United States Patent Application Publication US 2026/0327627 A1 - sequence listing, part 4

SEQ ID NO: 12696 - RNA, 23 nt, synthetic construct
  source 1..23: mol_type = other RNA
  modified_base 1: mod_base = OTHER; note = 2'-O-methyluridine-3'-phosphorothioate 5'-(E)-Vinylphosphonate
  modified_base 2: mod_base = OTHER; note = 2'-deoxy-2'-fluoroguanosine-3'-phosphorothioate
  modified_base 3: mod_base = OTHER; note = 2'-O-methyluridine-3'-phosphate
  modified_base 4: mod_base = OTHER; note = 2'-O-methyladenosine-3'-phosphate
  modified_base 5: mod_base = OTHER; note = 2'-O-methylguanosine-3'-phosphate
  modified_base 6: mod_base = OTHER; note = 2'-deoxy-2'-fluorocytidine-3'-phosphate
  modified_base 7: mod_base = OTHER; note = 2'-O-methyladenosine-3'-phosphate
  modified_base 8: mod_base = OTHER; note = 2'-O-methyluridine-3'-phosphate
  modified_base 9: mod_base = OTHER; note = 2'-O-methyluridine-3'-phosphate
  modified_base 10: mod_base = OTHER; note = 2'-O-methyluridine-3'-phosphate
  modified_base 11: mod_base = OTHER; note = 2'-O-methylcytidine-3'-phosphate
  modified_base 12: mod_base = OTHER; note = 2'-O-methyluridine-3'-phosphate
  modified_base 13: mod_base = OTHER; note = 2'-O-methyluridine-3'-phosphate
  modified_base 14: mod_base = OTHER; note = 2'-deoxy-2'-fluorouridine-3'-phosphate
  modified_base 15: mod_base = OTHER; note = 2'-O-methyladenosine-3'-phosphate
  modified_base 16: mod_base = OTHER; note = 2'-deoxy-2'-fluorocytidine-3'-phosphate
  modified_base 17: mod_base = OTHER; note = 2'-O-methyluridine-3'-phosphate
  modified_base 18: mod_base = OTHER; note = 2'-O-methylguanosine-3'-phosphate
  modified_base 19: mod_base = OTHER; note = 2'-O-methyluridine-3'-phosphate
  modified_base 20: mod_base = OTHER; note = 2'-O-methyluridine-3'-phosphate
  modified_base 21: mod_base = OTHER; note = 2'-O-methyladenosine-3'-phosphorothioate
  modified_base 22: mod_base = OTHER; note = 2'-O-methyluridine-3'-phosphorothioate
  modified_base 23: mod_base = OTHER; note = 2'-O-methyluridine
tgtagcatttctttactgttatt

SEQ ID NO: 12697 - RNA, 23 nt, synthetic construct
  source 1..23: mol_type = other RNA
  modified_base 1: mod_base = OTHER; note = 2'-O-methyluridine-3'-phosphorothioate 5'-(E)-Vinylphosphonate
  modified_base 2: mod_base = OTHER; note = 2'-deoxy-2'-fluoroadenosine-3'-phosphorothioate
  modified_base 3: mod_base = OTHER; note = 2'-O-methyladenosine-3'-phosphate
  modified_base 4: mod_base = OTHER; note = 2'-O-methylguanosine-3'-phosphate
  modified_base 5: mod_base = OTHER; note = 2'-O-methyluridine-3'-phosphate
  modified_base 6: mod_base = OTHER; note = 2'-deoxy-2'-fluoroadenosine-3'-phosphate
  modified_base 7: mod_base = OTHER; note = 2'-O-methylguanosine-3'-phosphate
  modified_base 8: mod_base = OTHER; note = 2'-O-methylcytidine-3'-phosphate
  modified_base 9: mod_base = OTHER; note = 2'-O-methyladenosine-3'-phosphate
  modified_base 10: mod_base = OTHER; note = 2'-O-methyluridine-3'-phosphate
  modified_base 11: mod_base = OTHER; note = 2'-O-methyluridine-3'-phosphate
  modified_base 12: mod_base = OTHER; note = 2'-O-methyluridine-3'-phosphate
  modified_base 13: mod_base = OTHER; note = 2'-O-methylcytidine-3'-phosphate
  modified_base 14: mod_base = OTHER; note = 2'-deoxy-2'-fluorouridine-3'-phosphate
  modified_base 15: mod_base = OTHER; note = 2'-O-methyluridine-3'-phosphate
  modified_base 16: mod_base = OTHER; note = 2'-deoxy-2'-fluorouridine-3'-phosphate
  modified_base 17: mod_base = OTHER; note = 2'-O-methyladenosine-3'-phosphate
  modified_base 18: mod_base = OTHER; note = 2'-O-methylcytidine-3'-phosphate
  modified_base 19: mod_base = OTHER; note = 2'-O-methyluridine-3'-phosphate
  modified_base 20: mod_base = OTHER; note = 2'-O-methylguanosine-3'-phosphate
  modified_base 21: mod_base = OTHER; note = 2'-O-methyluridine-3'-phosphorothioate
  modified_base 22: mod_base = OTHER; note = 2'-O-methyluridine-3'-phosphorothioate
  modified_base 23: mod_base = OTHER; note = 2'-O-methyladenosine
taagtagcatttctttactgtta

SEQ ID NO: 12698 - RNA, 23 nt, synthetic construct
  source 1..23: mol_type = other RNA
  modified_base 1: mod_base = OTHER; note = 2'-O-methyluridine-3'-phosphorothioate 5'-(E)-Vinylphosphonate
  modified_base 2: mod_base = OTHER; note = 2'-deoxy-2'-fluorocytidine-3'-phosphorothioate
  modified_base 3: mod_base = OTHER; note = 2'-O-methyladenosine-3'-phosphate
  modified_base 4: mod_base = OTHER; note = 2'-O-methyladenosine-3'-phosphate
  modified_base 5: mod_base = OTHER; note = 2'-O-methylguanosine-3'-phosphate
  modified_base 6: mod_base = OTHER; note = 2'-deoxy-2'-fluorouridine-3'-phosphate
  modified_base 7: mod_base = OTHER; note = 2'-O-methyladenosine-3'-phosphate
  modified_base 8: mod_base = OTHER; note = 2'-O-methylguanosine-3'-phosphate
  modified_base 9: mod_base = OTHER; note = 2'-O-methylcytidine-3'-phosphate
  modified_base 10: mod_base = OTHER; note = 2'-O-methyladenosine-3'-phosphate
  modified_base 11: mod_base = OTHER; note = 2'-O-methyluridine-3'-phosphate
  modified_base 12: mod_base = OTHER; note = 2'-O-methyluridine-3'-phosphate
  modified_base 13: mod_base = OTHER; note = 2'-O-methyluridine-3'-phosphate
  modified_base 14: mod_base = OTHER; note = 2'-deoxy-2'-fluorocytidine-3'-phosphate
  modified_base 15: mod_base = OTHER; note = 2'-O-methyluridine-3'-phosphate
  modified_base 16: mod_base = OTHER; note = 2'-deoxy-2'-fluorouridine-3'-phosphate
  modified_base 17: mod_base = OTHER; note = 2'-O-methyluridine-3'-phosphate
  modified_base 18: mod_base = OTHER; note = 2'-O-methyladenosine-3'-phosphate
  modified_base 19: mod_base = OTHER; note = 2'-O-methylcytidine-3'-phosphate
  modified_base 20: mod_base = OTHER; note = 2'-O-methyluridine-3'-phosphate
  modified_base 21: mod_base = OTHER; note = 2'-O-methylguanosine-3'-phosphorothioate
  modified_base 22: mod_base = OTHER; note = 2'-O-methyluridine-3'-phosphorothioate
  modified_base 23: mod_base = OTHER; note = 2'-O-methyluridine
tcaagtagcatttctttactgtt

SEQ ID NO: 12699 - RNA, 23 nt, synthetic construct
  source 1..23: mol_type = other RNA
  modified_base 1: mod_base = OTHER; note = 2'-O-methyluridine-3'-phosphorothioate 5'-(E)-Vinylphosphonate
  modified_base 2: mod_base = OTHER; note = 2'-deoxy-2'-fluorouridine-3'-phosphorothioate
  modified_base 3: mod_base = OTHER; note = 2'-O-methylcytidine-3'-phosphate
  modified_base 4: mod_base = OTHER; note = 2'-O-methyladenosine-3'-phosphate
  modified_base 5: mod_base = OTHER; note = 2'-O-methyladenosine-3'-phosphate
  modified_base 6: mod_base = OTHER; note = 2'-deoxy-2'-fluoroguanosine-3'-phosphate
  modified_base 7: mod_base = OTHER; note = 2'-O-methyluridine-3'-phosphate
  modified_base 8: mod_base = OTHER; note = 2'-O-methyladenosine-3'-phosphate
  modified_base 9: mod_base = OTHER; note = 2'-O-methylguanosine-3'-phosphate
  modified_base 10: mod_base = OTHER; note = 2'-O-methylcytidine-3'-phosphate
  modified_base 11: mod_base = OTHER; note = 2'-O-methyladenosine-3'-phosphate
  modified_base 12: mod_base = OTHER; note = 2'-O-methyluridine-3'-phosphate
  modified_base 13: mod_base = OTHER; note = 2'-O-methyluridine-3'-phosphate
  modified_base 14: mod_base = OTHER; note = 2'-deoxy-2'-fluorouridine-3'-phosphate
  modified_base 15: mod_base = OTHER; note = 2'-O-methylcytidine-3'-phosphate
  modified_base 16: mod_base = OTHER; note = 2'-deoxy-2'-fluorouridine-3'-phosphate
  modified_base 17: mod_base = OTHER; note = 2'-O-methyluridine-3'-phosphate
  modified_base 18: mod_base = OTHER; note = 2'-O-methyluridine-3'-phosphate
  modified_base 19: mod_base = OTHER; note = 2'-O-methyladenosine-3'-phosphate
  modified_base 20: mod_base = OTHER; note = 2'-O-methylcytidine-3'-phosphate
  modified_base 21: mod_base = OTHER; note = 2'-O-methyluridine-3'-phosphorothioate
  modified_base 22: mod_base = OTHER; note = 2'-O-methylguanosine-3'-phosphorothioate
  modified_base 23: mod_base = OTHER; note = 2'-O-methyluridine
ttcaagtagcatttctttactgt

SEQ ID NO: 12700 - RNA, 23 nt, synthetic construct
  source 1..23: mol_type = other RNA
  modified_base 1: mod_base = OTHER; note = 2'-O-methyluridine-3'-phosphorothioate 5'-(E)-Vinylphosphonate
  modified_base 2: mod_base = OTHER; note = 2'-deoxy-2'-fluoroadenosine-3'-phosphorothioate
  modified_base 3: mod_base = OTHER; note = 2'-O-methyluridine-3'-phosphate
  modified_base 4: mod_base = OTHER; note = 2'-O-methylcytidine-3'-phosphate
  modified_base 5: mod_base = OTHER; note = 2'-O-methyladenosine-3'-phosphate
  modified_base 6: mod_base = OTHER; note = 2'-deoxy-2'-fluoroadenosine-3'-phosphate
  modified_base 7: mod_base = OTHER; note = 2'-O-methylguanosine-3'-phosphate
  modified_base 8: mod_base = OTHER; note = 2'-O-methyluridine-3'-phosphate
  modified_base 9: mod_base = OTHER; note = 2'-O-methyladenosine-3'-phosphate
  modified_base 10: mod_base = OTHER; note = 2'-O-methylguanosine-3'-phosphate
  modified_base 11: mod_base = OTHER; note = 2'-O-methylcytidine-3'-phosphate
  modified_base 12: mod_base = OTHER; note = 2'-O-methyladenosine-3'-phosphate
  modified_base 13: mod_base = OTHER; note = 2'-O-methyluridine-3'-phosphate
  modified_base 14: mod_base = OTHER; note = 2'-deoxy-2'-fluorouridine-3'-phosphate
  modified_base 15: mod_base = OTHER; note = 2'-O-methyluridine-3'-phosphate
  modified_base 16: mod_base = OTHER; note = 2'-deoxy-2'-fluorocytidine-3'-phosphate
  modified_base 17: mod_base = OTHER; note = 2'-O-methyluridine-3'-phosphate
  modified_base 18: mod_base = OTHER; note = 2'-O-methyluridine-3'-phosphate
  modified_base 19: mod_base = OTHER; note = 2'-O-methyluridine-3'-phosphate
  modified_base 20: mod_base = OTHER; note = 2'-O-methyladenosine-3'-phosphate
  modified_base 21: mod_base = OTHER; note = 2'-O-methylcytidine-3'-phosphorothioate
  modified_base 22: mod_base = OTHER; note = 2'-O-methyluridine-3'-phosphorothioate
  modified_base 23: mod_base = OTHER; note = 2'-O-methylguanosine
tatcaagtagcatttctttactg

SEQ ID NO: 12701 - RNA, 23 nt, synthetic construct
  source 1..23: mol_type = other RNA
  modified_base 1: mod_base = OTHER; note = 2'-O-methyluridine-3'-phosphorothioate 5'-(E)-Vinylphosphonate
  modified_base 2: mod_base = OTHER; note = 2'-deoxy-2'-fluoroadenosine-3'-phosphorothioate
  modified_base 3: mod_base = OTHER; note = 2'-O-methyladenosine-3'-phosphate
  modified_base 4: mod_base = OTHER; note = 2'-O-methyluridine-3'-phosphate
  modified_base 5: mod_base = OTHER; note = 2'-O-methylcytidine-3'-phosphate
  modified_base 6: mod_base = OTHER; note = 2'-deoxy-2'-fluoroadenosine-3'-phosphate
  modified_base 7: mod_base = OTHER; note = 2'-O-methyladenosine-3'-phosphate
  modified_base 8: mod_base = OTHER; note = 2'-O-methylguanosine-3'-phosphate
  modified_base 9: mod_base = OTHER; note = 2'-O-methyluridine-3'-phosphate
  modified_base 10: mod_base = OTHER; note = 2'-O-methyladenosine-3'-phosphate
  modified_base 11: mod_base = OTHER; note = 2'-O-methylguanosine-3'-phosphate
  modified_base 12: mod_base = OTHER; note = 2'-O-methylcytidine-3'-phosphate
  modified_base 13: mod_base = OTHER; note = 2'-O-methyladenosine-3'-phosphate
  modified_base 14: mod_base = OTHER; note = 2'-deoxy-2'-fluorouridine-3'-phosphate
  modified_base 15: mod_base = OTHER; note = 2'-O-methyluridine-3'-phosphate
  modified_base 16: mod_base = OTHER; note = 2'-deoxy-2'-fluorouridine-3'-phosphate
  modified_base 17: mod_base = OTHER; note = 2'-O-methylcytidine-3'-phosphate
  modified_base 18: mod_base = OTHER; note = 2'-O-methyluridine-3'-phosphate
  modified_base 19: mod_base = OTHER; note = 2'-O-methyluridine-3'-phosphate
  modified_base 20: mod_base = OTHER; note = 2'-O-methyluridine-3'-phosphate
  modified_base 21: mod_base = OTHER; note = 2'-O-methyladenosine-3'-phosphorothioate
  modified_base 22: mod_base = OTHER; note = 2'-O-methylcytidine-3'-phosphorothioate
  modified_base 23: mod_base = OTHER; note = 2'-O-methyluridine
taatcaagtagcatttctttact

SEQ ID NO: 12702 - RNA, 23 nt, synthetic construct
  source 1..23: mol_type = other RNA
  modified_base 1: mod_base = OTHER; note = 2'-O-methyluridine-3'-phosphorothioate 5'-(E)-Vinylphosphonate
  modified_base 2: mod_base = OTHER; note = 2'-deoxy-2'-fluoroadenosine-3'-phosphorothioate
  modified_base 3: mod_base = OTHER; note = 2'-O-methyladenosine-3'-phosphate
  modified_base 4: mod_base = OTHER; note = 2'-O-methyladenosine-3'-phosphate
  modified_base 5: mod_base = OTHER; note = 2'-O-methyluridine-3'-phosphate
  modified_base 6: mod_base = OTHER; note = 2'-deoxy-2'-fluorocytidine-3'-phosphate
  modified_base 7: mod_base = OTHER; note = 2'-O-methyladenosine-3'-phosphate
  modified_base 8: mod_base = OTHER; note = 2'-O-methyladenosine-3'-phosphate
  modified_base 9: mod_base = OTHER; note = 2'-O-methylguanosine-3'-phosphate
  modified_base 10: mod_base = OTHER; note = 2'-O-methyluridine-3'-phosphate
  modified_base 11: mod_base = OTHER; note = 2'-O-methyladenosine-3'-phosphate
  modified_base 12: mod_base = OTHER; note = 2'-O-methylguanosine-3'-phosphate
  modified_base 13: mod_base = OTHER; note = 2'-O-methylcytidine-3'-phosphate
  modified_base 14: mod_base = OTHER; note = 2'-deoxy-2'-fluoroadenosine-3'-phosphate
  modified_base 15: mod_base = OTHER; note = 2'-O-methyluridine-3'-phosphate
  modified_base 16: mod_base = OTHER; note = 2'-deoxy-2'-fluorouridine-3'-phosphate
  modified_base 17: mod_base = OTHER; note = 2'-O-methyluridine-3'-phosphate
  modified_base 18: mod_base = OTHER; note = 2'-O-methylcytidine-3'-phosphate
  modified_base 19: mod_base = OTHER; note = 2'-O-methyluridine-3'-phosphate
  modified_base 20: mod_base = OTHER; note = 2'-O-methyluridine-3'-phosphate
  modified_base 21: mod_base = OTHER; note = 2'-O-methyluridine-3'-phosphorothioate
  modified_base 22: mod_base = OTHER; note = 2'-O-methyladenosine-3'-phosphorothioate
  modified_base 23: mod_base = OTHER; note = 2'-O-methylcytidine
taaatcaagtagcatttctttac

SEQ ID NO: 12703 - RNA, 23 nt, synthetic construct
  source 1..23: mol_type = other RNA
  modified_base 1: mod_base = OTHER; note = 2'-O-methyluridine-3'-phosphorothioate 5'-(E)-Vinylphosphonate
  modified_base 2: mod_base = OTHER; note = 2'-deoxy-2'-fluoroguanosine-3'-phosphorothioate
  modified_base 3: mod_base = OTHER; note = 2'-O-methyluridine-3'-phosphate
  modified_base 4: mod_base = OTHER; note = 2'-O-methyladenosine-3'-phosphate
  modified_base 5: mod_base = OTHER; note = 2'-O-methyladenosine-3'-phosphate
  modified_base 6: mod_base = OTHER; note = 2'-deoxy-2'-fluorouridine-3'-phosphate
  modified_base 7: mod_base = OTHER; note = 2'-O-methylcytidine-3'-phosphate
  modified_base 8: mod_base = OTHER; note = 2'-O-methyluridine-3'-phosphate
  modified_base 9: mod_base = OTHER; note = 2'-O-methylguanosine-3'-phosphate
  modified_base 10: mod_base = OTHER; note = 2'-O-methyladenosine-3'-phosphate
  modified_base 11: mod_base = OTHER; note = 2'-O-methylguanosine-3'-phosphate
  modified_base 12: mod_base = OTHER; note = 2'-O-methylcytidine-3'-phosphate
  modified_base 13: mod_base = OTHER; note = 2'-O-methyladenosine-3'-phosphate
  modified_base 14: mod_base = OTHER; note = 2'-deoxy-2'-fluoroadenosine-3'-phosphate
  modified_base 15: mod_base = OTHER; note = 2'-O-methyluridine-3'-phosphate
  modified_base 16: mod_base = OTHER; note = 2'-deoxy-2'-fluorocytidine-3'-phosphate
  modified_base 17: mod_base = OTHER; note = 2'-O-methylcytidine-3'-phosphate
  modified_base 18: mod_base = OTHER; note = 2'-O-methyladenosine-3'-phosphate
  modified_base 19: mod_base = OTHER; note = 2'-O-methylguanosine-3'-phosphate
  modified_base 20: mod_base = OTHER; note = 2'-O-methyluridine-3'-phosphate
  modified_base 21: mod_base = OTHER; note = 2'-O-methyluridine-3'-phosphorothioate
  modified_base 22: mod_base = OTHER; note = 2'-O-methyluridine-3'-phosphorothioate
  modified_base 23: mod_base = OTHER; note = 2'-O-methyladenosine
tgtaatctgagcaatccagttta

SEQ ID NO: 12704 - RNA, 23 nt, synthetic construct
  source 1..23: mol_type = other RNA
  modified_base 1: mod_base = OTHER; note = 2'-O-methyluridine-3'-phosphorothioate 5'-(E)-Vinylphosphonate
  modified_base 2: mod_base = OTHER; note = 2'-deoxy-2'-fluoroguanosine-3'-phosphorothioate
  modified_base 3: mod_base = OTHER; note = 2'-O-methyladenosine-3'-phosphate
  modified_base 4: mod_base = OTHER; note = 2'-O-methyluridine-3'-phosphate
  modified_base 5: mod_base = OTHER; note = 2'-O-methylcytidine-3'-phosphate
  modified_base 6: mod_base = OTHER; note = 2'-deoxy-2'-fluoroadenosine-3'-phosphate
  modified_base 7: mod_base = OTHER; note = 2'-O-methylguanosine-3'-phosphate
  modified_base 8: mod_base = OTHER; note = 2'-O-methylguanosine-3'-phosphate
  modified_base 9: mod_base = OTHER; note = 2'-O-methyluridine-3'-phosphate
  modified_base 10: mod_base = OTHER; note = 2'-O-methyladenosine-3'-phosphate
  modified_base 11: mod_base = OTHER; note = 2'-O-methyladenosine-3'-phosphate
  modified_base 12: mod_base = OTHER; note = 2'-O-methyluridine-3'-phosphate
  modified_base 13: mod_base = OTHER; note = 2'-O-methylcytidine-3'-phosphate
  modified_base 14: mod_base = OTHER; note = 2'-deoxy-2'-fluorouridine-3'-phosphate
  modified_base 15: mod_base = OTHER; note = 2'-O-methylguanosine-3'-phosphate
  modified_base 16: mod_base = OTHER; note = 2'-deoxy-2'-fluoroadenosine-3'-phosphate
  modified_base 17: mod_base = OTHER; note = 2'-O-methylguanosine-3'-phosphate
  modified_base 18: mod_base = OTHER; note = 2'-O-methylcytidine-3'-phosphate
  modified_base 19: mod_base = OTHER; note = 2'-O-methyladenosine-3'-phosphate
  modified_base 20: mod_base = OTHER; note = 2'-O-methyladenosine-3'-phosphate
  modified_base 21: mod_base = OTHER; note = 2'-O-methyluridine-3'-phosphorothioate
  modified_base 22: mod_base = OTHER; note = 2'-O-methylcytidine-3'-phosphorothioate
  modified_base 23: mod_base = OTHER; note = 2'-O-methylcytidine
tgatcaggtaatctgagcaatcc

SEQ ID NO: 12705 - RNA, 23 nt, synthetic construct
  source 1..23: mol_type = other RNA
  modified_base 1: mod_base = OTHER; note = 2'-O-methyluridine-3'-phosphorothioate 5'-(E)-Vinylphosphonate
  modified_base 2: mod_base = OTHER; note = 2'-deoxy-2'-fluorocytidine-3'-phosphorothioate
  modified_base 3: mod_base = OTHER; note = 2'-O-methyladenosine-3'-phosphate
  modified_base 4: mod_base = OTHER; note = 2'-O-methylcytidine-3'-phosphate
  modified_base 5: mod_base = OTHER; note = 2'-O-methylcytidine-3'-phosphate
  modified_base 6: mod_base = OTHER; note = 2'-deoxy-2'-fluoroadenosine-3'-phosphate
  modified_base 7: mod_base = OTHER; note = 2'-O-methylcytidine-3'-phosphate
  modified_base 8: mod_base = OTHER; note = 2'-O-methylguanosine-3'-phosphate
  modified_base 9: mod_base = OTHER; note = 2'-O-methyladenosine-3'-phosphate
  modified_base 10: mod_base = OTHER; note = 2'-O-methyluridine-3'-phosphate
  modified_base 11: mod_base = OTHER; note = 2'-O-methylcytidine-3'-phosphate
  modified_base 12: mod_base = OTHER; note = 2'-O-methyladenosine-3'-phosphate
  modified_base 13: mod_base = OTHER; note = 2'-O-methylguanosine-3'-phosphate
  modified_base 14: mod_base = OTHER; note = 2'-deoxy-2'-fluoroguanosine-3'-phosphate
  modified_base 15: mod_base = OTHER; note = 2'-O-methyluridine-3'-phosphate
  modified_base 16: mod_base = OTHER; note = 2'-deoxy-2'-fluoroadenosine-3'-phosphate
  modified_base 17: mod_base = OTHER; note = 2'-O-methyladenosine-3'-phosphate
  modified_base 18: mod_base = OTHER; note = 2'-O-methyluridine-3'-phosphate
  modified_base 19: mod_base = OTHER; note = 2'-O-methylcytidine-3'-phosphate
  modified_base 20: mod_base = OTHER; note = 2'-O-methyluridine-3'-phosphate
  modified_base 21: mod_base = OTHER; note = 2'-O-methylguanosine-3'-phosphorothioate
  modified_base 22: mod_base = OTHER; note = 2'-O-methyladenosine-3'-phosphorothioate
  modified_base 23: mod_base = OTHER; note = 2'-O-methylguanosine
tcaccacgatcaggtaatctgag

SEQ ID NO: 12706 - RNA, 23 nt, synthetic construct
  source 1..23: mol_type = other RNA
  modified_base 1: mod_base = OTHER; note = 2'-O-methyluridine-3'-phosphorothioate 5'-(E)-Vinylphosphonate
  modified_base 2: mod_base = OTHER; note = 2'-deoxy-2'-fluorocytidine-3'-phosphorothioate
  modified_base 3: mod_base = OTHER; note = 2'-O-methylcytidine-3'-phosphate
  modified_base 4: mod_base = OTHER; note = 2'-O-methyladenosine-3'-phosphate
  modified_base 5: mod_base = OTHER; note = 2'-O-methylcytidine-3'-phosphate
  modified_base 6: mod_base = OTHER; note = 2'-deoxy-2'-fluorocytidine-3'-phosphate
  modified_base 7: mod_base = OTHER; note = 2'-O-methyladenosine-3'-phosphate
  modified_base 8: mod_base = OTHER; note = 2'-O-methylcytidine-3'-phosphate
  modified_base 9: mod_base = OTHER; note = 2'-O-methylguanosine-3'-phosphate
  modified_base 10: mod_base = OTHER; note = 2'-O-methyladenosine-3'-phosphate
  modified_base 11: mod_base = OTHER; note = 2'-O-methyluridine-3'-phosphate
  modified_base 12: mod_base = OTHER; note = 2'-O-methylcytidine-3'-phosphate
  modified_base 13: mod_base = OTHER; note = 2'-O-methyladenosine-3'-phosphate
  modified_base 14: mod_base = OTHER; note = 2'-deoxy-2'-fluoroguanosine-3'-phosphate
  modified_base 15: mod_base = OTHER; note = 2'-O-methylguanosine-3'-phosphate
  modified_base 16: mod_base = OTHER; note = 2'-deoxy-2'-fluorouridine-3'-phosphate
  modified_base 17: mod_base = OTHER; note = 2'-O-methyladenosine-3'-phosphate
  modified_base 18: mod_base = OTHER; note = 2'-O-methyladenosine-3'-phosphate
  modified_base 19: mod_base = OTHER; note = 2'-O-methyluridine-3'-phosphate
  modified_base 20: mod_base = OTHER; note = 2'-O-methylcytidine-3'-phosphate
  modified_base 21: mod_base = OTHER; note = 2'-O-methyluridine-3'-phosphorothioate
  modified_base 22: mod_base = OTHER; note = 2'-O-methylguanosine-3'-phosphorothioate
  modified_base 23: mod_base = OTHER; note = 2'-O-methyladenosine
tccaccacgatcaggtaatctga

SEQ ID NO: 12707 - RNA, 23 nt, synthetic construct
  source 1..23: mol_type = other RNA
  modified_base 1: mod_base = OTHER; note = 2'-O-methyluridine-3'-phosphorothioate 5'-(E)-Vinylphosphonate
  modified_base 2: mod_base = OTHER; note = 2'-deoxy-2'-fluorouridine-3'-phosphorothioate
  modified_base 3: mod_base = OTHER; note = 2'-O-methylcytidine-3'-phosphate
  modified_base 4: mod_base = OTHER; note = 2'-O-methylcytidine-3'-phosphate
  modified_base 5: mod_base = OTHER; note = 2'-O-methyladenosine-3'-phosphate
  modified_base 6: mod_base = OTHER; note = 2'-deoxy-2'-fluorocytidine-3'-phosphate
  modified_base 7: mod_base = OTHER; note = 2'-O-methylcytidine-3'-phosphate
  modified_base 8: mod_base = OTHER; note = 2'-O-methyladenosine-3'-phosphate
  modified_base 9: mod_base = OTHER; note = 2'-O-methylcytidine-3'-phosphate
  modified_base 10: mod_base = OTHER; note = 2'-O-methylguanosine-3'-phosphate
  modified_base 11: mod_base = OTHER; note = 2'-O-methyladenosine-3'-phosphate
  modified_base 12: mod_base = OTHER; note = 2'-O-methyluridine-3'-phosphate
  modified_base 13: mod_base = OTHER; note = 2'-O-methylcytidine-3'-phosphate
  modified_base 14: mod_base = OTHER; note = 2'-deoxy-2'-fluoroadenosine-3'-phosphate
  modified_base 15: mod_base = OTHER; note = 2'-O-methylguanosine-3'-phosphate
  modified_base 16: mod_base = OTHER; note = 2'-deoxy-2'-fluoroguanosine-3'-phosphate
  modified_base 17: mod_base = OTHER; note = 2'-O-methyluridine-3'-phosphate
  modified_base 18: mod_base = OTHER; note = 2'-O-methyladenosine-3'-phosphate
  modified_base 19: mod_base = OTHER; note = 2'-O-methyladenosine-3'-phosphate
  modified_base 20: mod_base = OTHER; note = 2'-O-methyluridine-3'-phosphate
  modified_base 21: mod_base = OTHER; note = 2'-O-methylcytidine-3'-phosphorothioate
  modified_base 22: mod_base = OTHER; note = 2'-O-methyluridine-3'-phosphorothioate
  modified_base 23: mod_base = OTHER; note = 2'-O-methylguanosine
ttccaccacgatcaggtaatctg

SEQ ID NO: 12708 - RNA, 23 nt, synthetic construct
  source 1..23: mol_type = other RNA
  modified_base 1: mod_base = OTHER; note = 2'-O-methyluridine-3'-phosphorothioate 5'-(E)-Vinylphosphonate
  modified_base 2: mod_base = OTHER; note = 2'-deoxy-2'-fluorouridine-3'-phosphorothioate
  modified_base 3: mod_base = OTHER; note = 2'-O-methyluridine-3'-phosphate
  modified_base 4: mod_base = OTHER; note = 2'-O-methylcytidine-3'-phosphate
  modified_base 5: mod_base = OTHER; note = 2'-O-methylcytidine-3'-phosphate
  modified_base 6: mod_base = OTHER; note = 2'-deoxy-2'-fluoroadenosine-3'-phosphate
  modified_base 7: mod_base = OTHER; note = 2'-O-methylcytidine-3'-phosphate
  modified_base 8: mod_base = OTHER; note = 2'-O-methylcytidine-3'-phosphate
  modified_base 9: mod_base = OTHER; note = 2'-O-methyladenosine-3'-phosphate
  modified_base 10: mod_base = OTHER; note = 2'-O-methylcytidine-3'-phosphate
  modified_base 11: mod_base = OTHER; note = 2'-O-methylguanosine-3'-phosphate
  modified_base 12: mod_base = OTHER; note = 2'-O-methyladenosine-3'-phosphate
  modified_base 13: mod_base = OTHER; note = 2'-O-methyluridine-3'-phosphate
  modified_base 14: mod_base = OTHER; note = 2'-deoxy-2'-fluorocytidine-3'-phosphate
  modified_base 15: mod_base = OTHER; note = 2'-O-methyladenosine-3'-phosphate
  modified_base 16: mod_base = OTHER; note = 2'-deoxy-2'-fluoroguanosine-3'-phosphate
  modified_base 17: mod_base = OTHER; note = 2'-O-methylguanosine-3'-phosphate
  modified_base 18: mod_base = OTHER; note = 2'-O-methyluridine-3'-phosphate
  modified_base 19: mod_base = OTHER; note = 2'-O-methyladenosine-3'-phosphate
  modified_base 20: mod_base = OTHER; note = 2'-O-methyladenosine-3'-phosphate
  modified_base 21: mod_base = OTHER; note = 2'-O-methyluridine-3'-phosphorothioate
  modified_base 22: mod_base = OTHER; note = 2'-O-methylcytidine-3'-phosphorothioate
  modified_base 23: mod_base = OTHER; note = 2'-O-methyluridine
tttccaccacgatcaggtaatct

SEQ ID NO: 12709 - RNA, 23 nt, synthetic construct
  source 1..23: mol_type = other RNA
  modified_base 1: mod_base = OTHER; note = 2'-O-methyluridine-3'-phosphorothioate 5'-(E)-Vinylphosphonate
  modified_base 2: mod_base = OTHER; note = 2'-deoxy-2'-fluoroguanosine-3'-phosphorothioate
  modified_base 3: mod_base = OTHER; note = 2'-O-methyluridine-3'-phosphate
  modified_base 4: mod_base = OTHER; note = 2'-O-methyluridine-3'-phosphate
  modified_base 5: mod_base = OTHER; note = 2'-O-methylcytidine-3'-phosphate
  modified_base 6: mod_base = OTHER; note = 2'-deoxy-2'-fluorocytidine-3'-phosphate
  modified_base 7: mod_base = OTHER; note = 2'-O-methyladenosine-3'-phosphate
  modified_base 8: mod_base = OTHER; note = 2'-O-methylcytidine-3'-phosphate
  modified_base 9: mod_base = OTHER; note = 2'-O-methylcytidine-3'-phosphate
  modified_base 10: mod_base = OTHER; note = 2'-O-methyladenosine-3'-phosphate
  modified_base 11: mod_base = OTHER; note = 2'-O-methylcytidine-3'-phosphate
  modified_base 12: mod_base = OTHER; note = 2'-O-methylguanosine-3'-phosphate
  modified_base 13: mod_base = OTHER; note = 2'-O-methyladenosine-3'-phosphate
  modified_base 14: mod_base = OTHER; note = 2'-deoxy-2'-fluorouridine-3'-phosphate
  modified_base 15: mod_base = OTHER; note = 2'-O-methylcytidine-3'-phosphate
  modified_base 16: mod_base = OTHER; note = 2'-deoxy-2'-fluoroadenosine-3'-phosphate
  modified_base 17: mod_base = OTHER; note = 2'-O-methylguanosine-3'-phosphate
  modified_base 18: mod_base = OTHER; note = 2'-O-methylguanosine-3'-phosphate
  modified_base 19: mod_base = OTHER; note = 2'-O-methyluridine-3'-phosphate
  modified_base 20: mod_base = OTHER; note = 2'-O-methyladenosine-3'-phosphate
  modified_base 21: mod_base = OTHER; note = 2'-O-methyladenosine-3'-phosphorothioate
  modified_base 22: mod_base = OTHER; note = 2'-O-methyluridine-3'-phosphorothioate
  modified_base 23: mod_base = OTHER; note = 2'-O-methylcytidine
tgttccaccacgatcaggtaatc

SEQ ID NO: 12710 - RNA, 23 nt, synthetic construct
  source 1..23: mol_type = other RNA
  modified_base 1: mod_base = OTHER; note = 2'-O-methyluridine-3'-phosphorothioate 5'-(E)-Vinylphosphonate
  modified_base 2: mod_base = OTHER; note = 2'-deoxy-2'-fluoroguanosine-3'-phosphorothioate
  modified_base 3: mod_base = OTHER; note = 2'-O-methylguanosine-3'-phosphate
  modified_base 4: mod_base = OTHER; note = 2'-O-methyluridine-3'-phosphate
  modified_base 5: mod_base = OTHER; note = 2'-O-methyluridine-3'-phosphate
  modified_base 6: mod_base = OTHER; note = 2'-deoxy-2'-fluorocytidine-3'-phosphate
  modified_base 7: mod_base = OTHER; note = 2'-O-methylcytidine-3'-phosphate
  modified_base 8: mod_base = OTHER; note = 2'-O-methyladenosine-3'-phosphate
  modified_base 9: mod_base = OTHER; note = 2'-O-methylcytidine-3'-phosphate
  modified_base 10: mod_base = OTHER; note = 2'-O-methylcytidine-3'-phosphate
  modified_base 11: mod_base = OTHER; note = 2'-O-methyladenosine-3'-phosphate
  modified_base 12: mod_base = OTHER; note = 2'-O-methylcytidine-3'-phosphate
  modified_base 13: mod_base = OTHER; note = 2'-O-methylguanosine-3'-phosphate
  modified_base 14: mod_base = OTHER; note = 2'-deoxy-2'-fluoroadenosine-3'-phosphate
  modified_base 15: mod_base = OTHER; note = 2'-O-methyluridine-3'-phosphate
  modified_base 16: mod_base = OTHER; note = 2'-deoxy-2'-fluorocytidine-3'-phosphate
  modified_base 17: mod_base = OTHER; note = 2'-O-methyladenosine-3'-phosphate
  modified_base 18: mod_base = OTHER; note = 2'-O-methylguanosine-3'-phosphate
  modified_base 19: mod_base = OTHER; note = 2'-O-methylguanosine-3'-phosphate
  modified_base 20: mod_base = OTHER; note = 2'-O-methyluridine-3'-phosphate
  modified_base 21: mod_base = OTHER; note = 2'-O-methyladenosine-3'-phosphorothioate
  modified_base 22: mod_base = OTHER; note = 2'-O-methyladenosine-3'-phosphorothioate
  modified_base 23: mod_base = OTHER; note = 2'-O-methyluridine
tggttccaccacgatcaggtaat

SEQ ID NO: 12711 - RNA, 23 nt, synthetic construct
  source 1..23: mol_type = other RNA
  modified_base 1: mod_base = OTHER; note = 2'-O-methyluridine-3'-phosphorothioate 5'-(E)-Vinylphosphonate
  modified_base 2: mod_base = OTHER; note = 2'-deoxy-2'-fluoroguanosine-3'-phosphorothioate
  modified_base 3: mod_base = OTHER; note = 2'-O-methylguanosine-3'-phosphate
  modified_base 4: mod_base = OTHER; note = 2'-O-methylguanosine-3'-phosphate
  modified_base 5: mod_base = OTHER; note = 2'-O-methyluridine-3'-phosphate
  modified_base 6: mod_base = OTHER; note = 2'-deoxy-2'-fluorouridine-3'-phosphate
  modified_base 7: mod_base = OTHER; note = 2'-O-methylcytidine-3'-phosphate
  modified_base 8: mod_base = OTHER; note = 2'-O-methylcytidine-3'-phosphate
  modified_base 9: mod_base = OTHER; note = 2'-O-methyladenosine-3'-phosphate
  modified_base 10: mod_base = OTHER; note = 2'-O-methylcytidine-3'-phosphate
  modified_base 11: mod_base = OTHER; note = 2'-O-methylcytidine-3'-phosphate
  modified_base 12: mod_base = OTHER; note = 2'-O-methyladenosine-3'-phosphate
  modified_base 13: mod_base = OTHER; note = 2'-O-methylcytidine-3'-phosphate
  modified_base 14: mod_base = OTHER; note = 2'-deoxy-2'-fluoroguanosine-3'-phosphate
  modified_base 15: mod_base = OTHER; note = 2'-O-methyladenosine-3'-phosphate
  modified_base 16: mod_base = OTHER; note = 2'-deoxy-2'-fluorouridine-3'-phosphate
  modified_base 17: mod_base = OTHER; note = 2'-O-methylcytidine-3'-phosphate
  modified_base 18: mod_base = OTHER; note = 2'-O-methyladenosine-3'-phosphate
  modified_base 19: mod_base = OTHER; note = 2'-O-methylguanosine-3'-phosphate
  modified_base 20: mod_base = OTHER; note = 2'-O-methylguanosine-3'-phosphate
  modified_base 21: mod_base = OTHER; note = 2'-O-methyluridine-3'-phosphorothioate
  modified_base 22: mod_base = OTHER; note = 2'-O-methyladenosine-3'-phosphorothioate
  modified_base 23: mod_base = OTHER; note = 2'-O-methyladenosine
tgggttccaccacgatcaggtaa

SEQ ID NO: 12712 - RNA, 23 nt, synthetic construct
  source 1..23: mol_type = other RNA
  modified_base 1: mod_base = OTHER; note = 2'-O-methyluridine-3'-phosphorothioate 5'-(E)-Vinylphosphonate
  modified_base 2: mod_base = OTHER; note = 2'-deoxy-2'-fluoroadenosine-3'-phosphorothioate
  modified_base 3: mod_base = OTHER; note = 2'-O-methylguanosine-3'-phosphate
  modified_base 4: mod_base = OTHER; note = 2'-O-methylguanosine-3'-phosphate
  modified_base 5: mod_base = OTHER; note = 2'-O-methylguanosine-3'-phosphate
  modified_base 6: mod_base = OTHER; note = 2'-deoxy-2'-fluorouridine-3'-phosphate
  modified_base 7: mod_base = OTHER; note = 2'-O-methyluridine-3'-phosphate
  modified_base 8: mod_base = OTHER; note = 2'-O-methylcytidine-3'-phosphate
  modified_base 9: mod_base = OTHER; note = 2'-O-methylcytidine-3'-phosphate
  modified_base 10: mod_base = OTHER; note = 2'-O-methyladenosine-3'-phosphate
  modified_base 11: mod_base = OTHER; note = 2'-O-methylcytidine-3'-phosphate
  modified_base 12: mod_base = OTHER; note = 2'-O-methylcytidine-3'-phosphate
  modified_base 13: mod_base = OTHER; note = 2'-O-methyladenosine-3'-phosphate
  modified_base 14: mod_base = OTHER; note = 2'-deoxy-2'-fluorocytidine-3'-phosphate
  modified_base 15: mod_base = OTHER; note = 2'-O-methylguanosine-3'-phosphate
  modified_base 16: mod_base = OTHER; note = 2'-deoxy-2'-fluoroadenosine-3'-phosphate
  modified_base 17: mod_base = OTHER; note = 2'-O-methyluridine-3'-phosphate
  modified_base 18: mod_base = OTHER; note = 2'-O-methylcytidine-3'-phosphate
  modified_base 19: mod_base = OTHER; note = 2'-O-methyladenosine-3'-phosphate
  modified_base 20: mod_base = OTHER; note = 2'-O-methylguanosine-3'-phosphate
  modified_base 21: mod_base = OTHER; note = 2'-O-methylguanosine-3'-phosphorothioate
  modified_base 22: mod_base = OTHER; note = 2'-O-methyluridine-3'-phosphorothioate
  modified_base 23: mod_base = OTHER; note = 2'-O-methyladenosine
tagggttccaccacgatcaggta

SEQ ID NO: 12713 - RNA, 23 nt, synthetic construct
  source 1..23: mol_type = other RNA
  modified_base 1: mod_base = OTHER; note = 2'-O-methyluridine-3'-phosphorothioate 5'-(E)-Vinylphosphonate
  modified_base 2: mod_base = OTHER; note = 2'-deoxy-2'-fluorocytidine-3'-phosphorothioate
  modified_base 3: mod_base = OTHER; note = 2'-O-methyluridine-3'-phosphate
  modified_base 4: mod_base = OTHER; note = 2'-O-methyluridine-3'-phosphate
  modified_base 5: mod_base = OTHER; note = 2'-O-methyluridine-3'-phosphate
  modified_base 6: mod_base = OTHER; note = 2'-deoxy-2'-fluoroguanosine-3'-phosphate
  modified_base 7: mod_base = OTHER; note = 2'-O-methylcytidine-3'-phosphate
  modified_base 8: mod_base = OTHER; note = 2'-O-methyluridine-3'-phosphate
  modified_base 9: mod_base = OTHER; note = 2'-O-methyluridine-3'-phosphate
  modified_base 10: mod_base = OTHER; note = 2'-O-methyluridine-3'-phosphate
  modified_base 11: mod_base = OTHER; note = 2'-O-methyladenosine-3'-phosphate
  modified_base 12: mod_base = OTHER; note = 2'-O-methyluridine-3'-phosphate
  modified_base 13: mod_base = OTHER; note = 2'-O-methyladenosine-3'-phosphate
  modified_base 14: mod_base = OTHER; note = 2'-deoxy-2'-fluoroguanosine-3'-phosphate
  modified_base 15: mod_base = OTHER; note = 2'-O-methyladenosine-3'-phosphate
  modified_base 16: mod_base = OTHER; note = 2'-deoxy-2'-fluoroadenosine-3'-phosphate
  modified_base 17: mod_base = OTHER; note = 2'-O-methylcytidine-3'-phosphate
  modified_base 18: mod_base = OTHER; note = 2'-O-methyladenosine-3'-phosphate
  modified_base 19: mod_base = OTHER; note = 2'-O-methylguanosine-3'-phosphate
  modified_base 20: mod_base = OTHER; note = 2'-O-methyluridine-3'-phosphate
  modified_base 21: mod_base = OTHER; note = 2'-O-methyluridine-3'-phosphorothioate
  modified_base 22: mod_base = OTHER; note = 2'-O-methyladenosine-3'-phosphorothioate
  modified_base 23: mod_base = OTHER; note = 2'-O-methyladenosine
tctttgctttatagaacagttaa

SEQ ID NO: 12714 - RNA, 23 nt, synthetic construct
  source 1..23: mol_type = other RNA
  modified_base 1: mod_base = OTHER; note = 2'-O-methyluridine-3'-phosphorothioate 5'-(E)-Vinylphosphonate
  modified_base 2: mod_base = OTHER; note = 2'-deoxy-2'-fluoroguanosine-3'-phosphorothioate
  modified_base 3: mod_base = OTHER; note = 2'-O-methyladenosine-3'-phosphate
  modified_base 4: mod_base = OTHER; note = 2'-O-methyladenosine-3'-phosphate
  modified_base 5: mod_base = OTHER; note = 2'-O-methylcytidine-3'-phosphate
  modified_base 6: mod_base = OTHER; note = 2'-deoxy-2'-fluoroadenosine-3'-phosphate
  modified_base 7: mod_base = OTHER; note = 2'-O-methylguanosine-3'-phosphate
  modified_base 8: mod_base = OTHER; note = 2'-O-methyluridine-3'-phosphate
  modified_base 9: mod_base = OTHER; note = 2'-O-methyluridine-3'-phosphate
  modified_base 10: mod_base = OTHER; note = 2'-O-methyladenosine-3'-phosphate
  modified_base 11: mod_base = OTHER; note = 2'-O-methyladenosine-3'-phosphate
  modified_base 12: mod_base = OTHER; note = 2'-O-methyladenosine-3'-phosphate
  modified_base 13: mod_base = OTHER; note = 2'-O-methyluridine-3'-phosphate
  modified_base 14: mod_base = OTHER; note = 2'-deoxy-2'-fluoroadenosine-3'-phosphate
  modified_base 15: mod_base = OTHER; note = 2'-O-methyluridine-3'-phosphate
  modified_base 16: mod_base = OTHER; note = 2'-deoxy-2'-fluoroguanosine-3'-phosphate
  modified_base 17: mod_base = OTHER; note = 2'-O-methylguanosine-3'-phosphate
  modified_base 18: mod_base = OTHER; note = 2'-O-methylguanosine-3'-phosphate
  modified_base 19: mod_base = OTHER; note = 2'-O-methyladenosine-3'-phosphate
  modified_base 20: mod_base = OTHER; note = 2'-O-methyluridine-3'-phosphate
  modified_base 21: mod_base = OTHER; note = 2'-O-methyladenosine-3'-phosphorothioate
  modified_base 22: mod_base = OTHER; note = 2'-O-methylguanosine-3'-phosphorothioate
  modified_base 23: mod_base = OTHER; note = 2'-O-methyluridine
tgaacagttaaatatgggatagt

SEQ ID NO: 12715 - RNA, 23 nt, synthetic construct
  source 1..23: mol_type = other RNA
  modified_base 1: mod_base = OTHER; note = 2'-O-methyluridine-3'-phosphorothioate 5'-(E)-Vinylphosphonate
  modified_base 2: mod_base = OTHER; note = 2'-deoxy-2'-fluoroadenosine-3'-phosphorothioate
  modified_base 3: mod_base = OTHER; note = 2'-O-methylguanosine-3'-phosphate
  modified_base 4: mod_base = OTHER; note = 2'-O-methyladenosine-3'-phosphate
  modified_base 5: mod_base = OTHER; note = 2'-O-methyladenosine-3'-phosphate
  modified_base 6: mod_base = OTHER; note = 2'-deoxy-2'-fluorocytidine-3'-phosphate
  modified_base 7: mod_base = OTHER; note = 2'-O-methyladenosine-3'-phosphate
  modified_base 8: mod_base = OTHER; note = 2'-O-methylguanosine-3'-phosphate
  modified_base 9: mod_base = OTHER; note = 2'-O-methyluridine-3'-phosphate
  modified_base 10: mod_base = OTHER; note = 2'-O-methyluridine-3'-phosphate
  modified_base 11: mod_base = OTHER; note = 2'-O-methyladenosine-3'-phosphate
  modified_base 12: mod_base = OTHER; note = 2'-O-methyladenosine-3'-phosphate
  modified_base 13: mod_base = OTHER; note = 2'-O-methyladenosine-3'-phosphate
  modified_base 14: mod_base = OTHER; note = 2'-deoxy-2'-fluorouridine-3'-phosphate
  modified_base 15: mod_base = OTHER; note = 2'-O-methyladenosine-3'-phosphate
  modified_base 16: mod_base = OTHER; note = 2'-deoxy-2'-fluorouridine-3'-phosphate
  modified_base 17: mod_base = OTHER; note = 2'-O-methylguanosine-3'-phosphate
  modified_base 18: mod_base = OTHER; note = 2'-O-methylguanosine-3'-phosphate
  modified_base 19: mod_base = OTHER; note = 2'-O-methylguanosine-3'-phosphate
  modified_base 20: mod_base = OTHER; note = 2'-O-methyladenosine-3'-phosphate
  modified_base 21: mod_base = OTHER; note = 2'-O-methyluridine-3'-phosphorothioate
  modified_base 22: mod_base = OTHER; note = 2'-O-methyladenosine-3'-phosphorothioate
  modified_base 23: mod_base = OTHER; note = 2'-O-methylguanosine
tagaacagttaaatatgggatag

SEQ ID NO: 12716 - RNA, 23 nt, synthetic construct
  source 1..23: mol_type = other RNA
  modified_base 1: mod_base = OTHER; note = 2'-O-methyluridine-3'-phosphorothioate 5'-(E)-Vinylphosphonate
  modified_base 2: mod_base = OTHER; note = 2'-deoxy-2'-fluorouridine-3'-phosphorothioate
  modified_base 3: mod_base = OTHER; note = 2'-O-methyladenosine-3'-phosphate
  modified_base 4: mod_base = OTHER; note = 2'-O-methylguanosine-3'-phosphate
  modified_base 5: mod_base = OTHER; note = 2'-O-methyladenosine-3'-phosphate
  modified_base 6: mod_base = OTHER; note = 2'-deoxy-2'-fluoroadenosine-3'-phosphate
  modified_base 7: mod_base = OTHER; note = 2'-O-methylcytidine-3'-phosphate
  modified_base 8: mod_base = OTHER; note = 2'-O-methyladenosine-3'-phosphate
  modified_base 9: mod_base = OTHER; note = 2'-O-methylguanosine-3'-phosphate
  modified_base 10: mod_base = OTHER; note = 2'-O-methyluridine-3'-phosphate
  modified_base 11: mod_base = OTHER; note = 2'-O-methyluridine-3'-phosphate
  modified_base 12: mod_base = OTHER; note = 2'-O-methyladenosine-3'-phosphate
  modified_base 13: mod_base = OTHER; note = 2'-O-methyladenosine-3'-phosphate
  modified_base 14: mod_base = OTHER; note = 2'-deoxy-2'-fluoroadenosine-3'-phosphate
  modified_base 15: mod_base = OTHER; note = 2'-O-methyluridine-3'-phosphate
  modified_base 16: mod_base = OTHER; note = 2'-deoxy-2'-fluoroadenosine-3'-phosphate
  modified_base 17: mod_base = OTHER; note = 2'-O-methyluridine-3'-phosphate
  modified_base 18: mod_base = OTHER; note = 2'-O-methylguanosine-3'-phosphate
  modified_base 19: mod_base = OTHER; note = 2'-O-methylguanosine-3'-phosphate
  modified_base 20: mod_base = OTHER; note = 2'-O-methylguanosine-3'-phosphate
  modified_base 21: mod_base = OTHER; note = 2'-O-methyladenosine-3'-phosphorothioate
  modified_base 22: mod_base = OTHER; note = 2'-O-methyluridine-3'-phosphorothioate
  modified_base 23: mod_base = OTHER; note = 2'-O-methyladenosine
ttagaacagttaaatatgggata

SEQ ID NO: 12717 - RNA, 23 nt, synthetic construct
  source 1..23: mol_type = other RNA
  modified_base 1: mod_base = OTHER; note = 2'-O-methyluridine-3'-phosphorothioate 5'-(E)-Vinylphosphonate
  modified_base 2: mod_base = OTHER; note = 2'-deoxy-2'-fluoroadenosine-3'-phosphorothioate
  modified_base 3: mod_base = OTHER; note = 2'-O-methyluridine-3'-phosphate
  modified_base 4: mod_base = OTHER; note = 2'-O-methyladenosine-3'-phosphate
  modified_base 5: mod_base = OTHER; note = 2'-O-methylguanosine-3'-phosphate
  modified_base 6: mod_base = OTHER; note = 2'-deoxy-2'-fluoroadenosine-3'-phosphate
  modified_base 7: mod_base = OTHER; note = 2'-O-methyladenosine-3'-phosphate
  modified_base 8: mod_base = OTHER; note = 2'-O-methylcytidine-3'-phosphate
  modified_base 9: mod_base = OTHER; note = 2'-O-methyladenosine-3'-phosphate
  modified_base 10: mod_base = OTHER; note = 2'-O-methylguanosine-3'-phosphate
  modified_base 11: mod_base = OTHER; note = 2'-O-methyluridine-3'-phosphate
  modified_base 12: mod_base = OTHER; note = 2'-O-methyluridine-3'-phosphate
  modified_base 13: mod_base = OTHER; note = 2'-O-methyladenosine-3'-phosphate
  modified_base 14: mod_base = OTHER; note = 2'-deoxy-2'-fluoroadenosine-3'-phosphate
  modified_base 15: mod_base = OTHER; note = 2'-O-methyladenosine-3'-phosphate
  modified_base 16: mod_base = OTHER; note = 2'-deoxy-2'-fluorouridine-3'-phosphate
  modified_base 17: mod_base = OTHER; note = 2'-O-methyladenosine-3'-phosphate
  modified_base 18: mod_base = OTHER; note = 2'-O-methyluridine-3'-phosphate
  modified_base 19: mod_base = OTHER; note = 2'-O-methylguanosine-3'-phosphate
  modified_base 20: mod_base = OTHER; note = 2'-O-methylguanosine-3'-phosphate
  modified_base 21: mod_base = OTHER; note = 2'-O-methylguanosine-3'-phosphorothioate
  modified_base 22: mod_base = OTHER; note = 2'-O-methyladenosine-3'-phosphorothioate
  modified_base 23: mod_base = OTHER; note = 2'-O-methyluridine
tatagaacagttaaatatgggat

SEQ ID NO: 12718 - RNA, 23 nt, synthetic construct
  source 1..23: mol_type = other RNA
  modified_base 1: mod_base = OTHER; note = 2'-O-methyluridine-3'-phosphorothioate 5'-(E)-Vinylphosphonate
  modified_base 2: mod_base = OTHER; note = 2'-deoxy-2'-fluorouridine-3'-phosphorothioate
  modified_base 3: mod_base = OTHER; note = 2'-O-methyladenosine-3'-phosphate
  modified_base 4: mod_base = OTHER; note = 2'-O-methyluridine-3'-phosphate
  modified_base 5: mod_base = OTHER; note = 2'-O-methyladenosine-3'-phosphate
  modified_base 6: mod_base = OTHER; note = 2'-deoxy-2'-fluoroguanosine-3'-phosphate
  modified_base 7: mod_base = OTHER; note = 2'-O-methyladenosine-3'-phosphate
  modified_base 8: mod_base = OTHER; note = 2'-O-methyladenosine-3'-phosphate
  modified_base 9: mod_base = OTHER; note = 2'-O-methylcytidine-3'-phosphate
  modified_base 10: mod_base = OTHER; note = 2'-O-methyladenosine-3'-phosphate
  modified_base 11: mod_base = OTHER; note = 2'-O-methylguanosine-3'-phosphate
  modified_base 12: mod_base = OTHER; note = 2'-O-methyluridine-3'-phosphate
  modified_base 13: mod_base = OTHER; note = 2'-O-methyluridine-3'-phosphate
  modified_base 14: mod_base = OTHER; note = 2'-deoxy-2'-fluoroadenosine-3'-phosphate
  modified_base 15: mod_base = OTHER; note = 2'-O-methyladenosine-3'-phosphate
  modified_base 16: mod_base = OTHER; note = 2'-deoxy-2'-fluoroadenosine-3'-phosphate
  modified_base 17: mod_base = OTHER; note = 2'-O-methyluridine-3'-phosphate
  modified_base 18: mod_base = OTHER; note = 2'-O-methyladenosine-3'-phosphate
  modified_base 19: mod_base = OTHER; note = 2'-O-methyluridine-3'-phosphate
  modified_base 20: mod_base = OTHER; note = 2'-O-methylguanosine-3'-phosphate
  modified_base 21: mod_base = OTHER; note = 2'-O-methylguanosine-3'-phosphorothioate
  modified_base 22: mod_base = OTHER; note = 2'-O-methylguanosine-3'-phosphorothioate
  modified_base 23: mod_base = OTHER; note = 2'-O-methyladenosine
ttatagaacagttaaatatggga

SEQ ID NO: 12719 - RNA, 23 nt, synthetic construct
  source 1..23: mol_type = other RNA
  modified_base 1: mod_base = OTHER; note = 2'-O-methyluridine-3'-phosphorothioate 5'-(E)-Vinylphosphonate
  modified_base 2: mod_base = OTHER; note = 2'-deoxy-2'-fluorouridine-3'-phosphorothioate
  modified_base 3: mod_base = OTHER; note = 2'-O-methyluridine-3'-phosphate
  modified_base 4: mod_base = OTHER; note = 2'-O-methyladenosine-3'-phosphate
  modified_base 5: mod_base = OTHER; note = 2'-O-methyluridine-3'-phosphate
  modified_base 6: mod_base = OTHER; note = 2'-deoxy-2'-fluoroadenosine-3'-phosphate
  modified_base 7: mod_base = OTHER; note = 2'-O-methylguanosine-3'-phosphate
  modified_base 8: mod_base = OTHER; note = 2'-O-methyladenosine-3'-phosphate
  modified_base 9: mod_base = OTHER; note = 2'-O-methyladenosine-3'-phosphate
  modified_base 10: mod_base = OTHER; note = 2'-O-methylcytidine-3'-phosphate
  modified_base 11: mod_base = OTHER; note = 2'-O-methyladenosine-3'-phosphate
  modified_base 12: mod_base = OTHER; note = 2'-O-methylguanosine-3'-phosphate
  modified_base 13: mod_base = OTHER; note = 2'-O-methyluridine-3'-phosphate
  modified_base 14: mod_base = OTHER; note = 2'-deoxy-2'-fluorouridine-3'-phosphate
  modified_base 15: mod_base = OTHER; note = 2'-O-methyladenosine-3'-phosphate
  modified_base 16: mod_base = OTHER; note = 2'-deoxy-2'-fluoroadenosine-3'-phosphate
  modified_base 17: mod_base = OTHER; note = 2'-O-methyladenosine-3'-phosphate
  modified_base 18: mod_base = OTHER; note = 2'-O-methyluridine-3'-phosphate
  modified_base 19: mod_base = OTHER; note = 2'-O-methyladenosine-3'-phosphate
  modified_base 20: mod_base = OTHER; note = 2'-O-methyluridine-3'-phosphate
  modified_base 21: mod_base = OTHER; note = 2'-O-methylguanosine-3'-phosphorothioate
  modified_base 22: mod_base = OTHER; note = 2'-O-methylguanosine-3'-phosphorothioate
  modified_base 23: mod_base = OTHER; note = 2'-O-methylguanosine
tttatagaacagttaaatatggg

SEQ ID NO: 12720 - RNA, 23 nt, synthetic construct
  source 1..23: mol_type = other RNA
  modified_base 1: mod_base = OTHER; note = 2'-O-methyluridine-3'-phosphorothioate 5'-(E)-Vinylphosphonate
  modified_base 2: mod_base = OTHER; note = 2'-deoxy-2'-fluoroguanosine-3'-phosphorothioate
  modified_base 3: mod_base = OTHER; note = 2'-O-methylcytidine-3'-phosphate
  modified_base 4: mod_base = OTHER; note = 2'-O-methyluridine-3'-phosphate
  modified_base 5: mod_base = OTHER; note = 2'-O-methyluridine-3'-phosphate
  modified_base 6: mod_base = OTHER; note = 2'-deoxy-2'-fluorouridine-3'-phosphate
  modified_base 7: mod_base = OTHER; note = 2'-O-methylguanosine-3'-phosphate
  modified_base 8: mod_base = OTHER; note = 2'-O-methylcytidine-3'-phosphate
  modified_base 9: mod_base = OTHER; note = 2'-O-methyluridine-3'-phosphate
  modified_base 10: mod_base = OTHER; note = 2'-O-methyluridine-3'-phosphate
  modified_base 11: mod_base = OTHER; note = 2'-O-methyluridine-3'-phosphate
  modified_base 12: mod_base = OTHER; note = 2'-O-methyladenosine-3'-phosphate
  modified_base 13: mod_base = OTHER; note = 2'-O-methyluridine-3'-phosphate
  modified_base 14: mod_base = OTHER; note = 2'-deoxy-2'-fluoroadenosine-3'-phosphate
  modified_base 15: mod_base = OTHER; note = 2'-O-methylguanosine-3'-phosphate
  modified_base 16: mod_base = OTHER; note = 2'-deoxy-2'-fluoroadenosine-3'-phosphate
  modified_base 17: mod_base = OTHER; note = 2'-O-methyladenosine-3'-phosphate
  modified_base 18: mod_base = OTHER; note = 2'-O-methylcytidine-3'-phosphate
  modified_base 19: mod_base = OTHER; note = 2'-O-methyladenosine-3'-phosphate
  modified_base 20: mod_base = OTHER; note = 2'-O-methylguanosine-3'-phosphate
  modified_base 21: mod_base = OTHER; note = 2'-O-methyluridine-3'-phosphorothioate
  modified_base 22: mod_base = OTHER; note = 2'-O-methyluridine-3'-phosphorothioate
  modified_base 23: mod_base = OTHER; note = 2'-O-methyladenosine
tgctttgctttatagaacagtta

SEQ ID NO: 12721 - RNA, 23 nt, synthetic construct
  source 1..23: mol_type = other RNA
  modified_base 1: mod_base = OTHER; note = 2'-O-methyluridine-3'-phosphorothioate 5'-(E)-Vinylphosphonate
  modified_base 2: mod_base = OTHER; note = 2'-deoxy-2'-fluorouridine-3'-phosphorothioate
  modified_base 3: mod_base = OTHER; note = 2'-O-methylguanosine-3'-phosphate
  modified_base 4: mod_base = OTHER; note = 2'-O-methylcytidine-3'-phosphate
  modified_base 5: mod_base = OTHER; note = 2'-O-methyluridine-3'-phosphate
  modified_base 6: mod_base = OTHER; note = 2'-deoxy-2'-fluorouridine-3'-phosphate
  modified_base 7: mod_base = OTHER; note = 2'-O-methyluridine-3'-phosphate
  modified_base 8: mod_base = OTHER; note = 2'-O-methylguanosine-3'-phosphate
  modified_base 9: mod_base = OTHER; note = 2'-O-methylcytidine-3'-phosphate
  modified_base 10: mod_base = OTHER; note = 2'-O-methyluridine-3'-phosphate
  modified_base 11: mod_base = OTHER; note = 2'-O-methyluridine-3'-phosphate
  modified_base 12: mod_base = OTHER; note = 2'-O-methyluridine-3'-phosphate
  modified_base 13: mod_base = OTHER; note = 2'-O-methyladenosine-3'-phosphate
  modified_base 14: mod_base = OTHER; note = 2'-deoxy-2'-fluorouridine-3'-phosphate
  modified_base 15: mod_base = OTHER; note = 2'-O-methyladenosine-3'-phosphate
  modified_base 16: mod_base = OTHER; note = 2'-deoxy-2'-fluoroguanosine-3'-phosphate
  modified_base 17: mod_base = OTHER; note = 2'-O-methyladenosine-3'-phosphate
  modified_base 18: mod_base = OTHER; note = 2'-O-methyladenosine-3'-phosphate
  modified_base 19: mod_base = OTHER; note = 2'-O-methylcytidine-3'-phosphate
  modified_base 20: mod_base = OTHER; note = 2'-O-methyladenosine-3'-phosphate
  modified_base 21: mod_base = OTHER; note = 2'-O-methylguanosine-3'-phosphorothioate
  modified_base 22: mod_base = OTHER; note = 2'-O-methyluridine-3'-phosphorothioate
  modified_base 23: mod_base = OTHER; note = 2'-O-methyluridine
ttgctttgctttatagaacagtt

SEQ ID NO: 12722 - RNA, 23 nt, synthetic construct
  source 1..23: mol_type = other RNA
  modified_base 1: mod_base = OTHER; note = 2'-O-methyluridine-3'-phosphorothioate 5'-(E)-Vinylphosphonate
  modified_base 2: mod_base = OTHER; note = 2'-deoxy-2'-fluoroguanosine-3'-phosphorothioate
  modified_base 3: mod_base = OTHER; note = 2'-O-methyluridine-3'-phosphate
  modified_base 4: mod_base = OTHER; note = 2'-O-methylguanosine-3'-phosphate
  modified_base 5: mod_base = OTHER; note = 2'-O-methylcytidine-3'-phosphate
  modified_base 6: mod_base = OTHER; note = 2'-deoxy-2'-fluorouridine-3'-phosphate
  modified_base 7: mod_base = OTHER; note = 2'-O-methyluridine-3'-phosphate
  modified_base 8: mod_base = OTHER; note = 2'-O-methyluridine-3'-phosphate
  modified_base 9: mod_base = OTHER; note = 2'-O-methylguanosine-3'-phosphate
  modified_base 10: mod_base = OTHER; note = 2'-O-methylcytidine-3'-phosphate
  modified_base 11: mod_base = OTHER; note = 2'-O-methyluridine-3'-phosphate
  modified_base 12: mod_base = OTHER; note = 2'-O-methyluridine-3'-phosphate
  modified_base 13: mod_base = OTHER; note = 2'-O-methyluridine-3'-phosphate
  modified_base 14: mod_base = OTHER; note = 2'-deoxy-2'-fluoroadenosine-3'-phosphate
  modified_base 15: mod_base = OTHER; note = 2'-O-methyluridine-3'-phosphate
  modified_base 16: mod_base = OTHER; note = 2'-deoxy-2'-fluoroadenosine-3'-phosphate
  modified_base 17: mod_base = OTHER; note = 2'-O-methylguanosine-3'-phosphate
  modified_base 18: mod_base = OTHER; note = 2'-O-methyladenosine-3'-phosphate
  modified_base 19: mod_base = OTHER; note = 2'-O-methyladenosine-3'-phosphate
  modified_base 20: mod_base = OTHER; note = 2'-O-methylcytidine-3'-phosphate
  modified_base 21: mod_base = OTHER; note = 2'-O-methyladenosine-3'-phosphorothioate
  modified_base 22: mod_base = OTHER; note = 2'-O-methylguanosine-3'-phosphorothioate
  modified_base 23: mod_base = OTHER; note = 2'-O-methyluridine
tgtgctttgctttatagaacagt

SEQ ID NO: 12723 - RNA, 23 nt, synthetic construct
  source 1..23: mol_type = other RNA
  modified_base 1: mod_base = OTHER; note = 2'-O-methyluridine-3'-phosphorothioate 5'-(E)-Vinylphosphonate
  modified_base 2: mod_base = OTHER; note = 2'-deoxy-2'-fluorouridine-3'-phosphorothioate
  modified_base 3: mod_base = OTHER; note = 2'-O-methylguanosine-3'-phosphate
  modified_base 4: mod_base = OTHER; note = 2'-O-methyluridine-3'-phosphate
  modified_base 5: mod_base = OTHER; note = 2'-O-methylguanosine-3'-phosphate
  modified_base 6: mod_base = OTHER; note = 2'-deoxy-2'-fluorocytidine-3'-phosphate
  modified_base 7: mod_base = OTHER; note = 2'-O-methyluridine-3'-phosphate
  modified_base 8: mod_base = OTHER; note = 2'-O-methyluridine-3'-phosphate
  modified_base 9: mod_base = OTHER; note = 2'-O-methyluridine-3'-phosphate
  modified_base 10: mod_base = OTHER; note = 2'-O-methylguanosine-3'-phosphate
  modified_base 11: mod_base = OTHER; note = 2'-O-methylcytidine-3'-phosphate
  modified_base 12: mod_base = OTHER; note = 2'-O-methyluridine-3'-phosphate
  modified_base 13: mod_base = OTHER; note = 2'-O-methyluridine-3'-phosphate
  modified_base 14: mod_base = OTHER; note = 2'-deoxy-2'-fluorouridine-3'-phosphate
  modified_base 15: mod_base = OTHER; note = 2'-O-methyladenosine-3'-phosphate
  modified_base 16: mod_base = OTHER; note = 2'-deoxy-2'-fluorouridine-3'-phosphate
  modified_base 17: mod_base = OTHER; note = 2'-O-methyladenosine-3'-phosphate
  modified_base 18: mod_base = OTHER; note = 2'-O-methylguanosine-3'-phosphate
  modified_base 19: mod_base = OTHER; note = 2'-O-methyladenosine-3'-phosphate
  modified_base 20: mod_base = OTHER; note = 2'-O-methyladenosine-3'-phosphate
  modified_base 21: mod_base = OTHER; note = 2'-O-methylcytidine-3'-phosphorothioate
  modified_base 22: mod_base = OTHER; note = 2'-O-methyladenosine-3'-phosphorothioate
  modified_base 23: mod_base = OTHER; note = 2'-O-methylguanosine
ttgtgctttgctttatagaacag

SEQ ID NO: 12724 - RNA, 23 nt, synthetic construct
  source 1..23: mol_type = other RNA
  modified_base 1: mod_base = OTHER; note = 2'-O-methyluridine-3'-phosphorothioate 5'-(E)-Vinylphosphonate
  modified_base 2: mod_base = OTHER; note = 2'-deoxy-2'-fluorocytidine-3'-phosphorothioate
  modified_base 3: mod_base = OTHER; note = 2'-O-methyluridine-3'-phosphate
  modified_base 4: mod_base = OTHER; note = 2'-O-methylguanosine-3'-phosphate
  modified_base 5: mod_base = OTHER; note = 2'-O-methyluridine-3'-phosphate
  modified_base 6: mod_base = OTHER; note = 2'-deoxy-2'-fluoroguanosine-3'-phosphate
  modified_base 7: mod_base = OTHER; note = 2'-O-methylcytidine-3'-phosphate
  modified_base 8: mod_base = OTHER; note = 2'-O-methyluridine-3'-phosphate
  modified_base 9: mod_base = OTHER; note = 2'-O-methyluridine-3'-phosphate
  modified_base 10: mod_base = OTHER; note = 2'-O-methyluridine-3'-phosphate
  modified_base 11: mod_base = OTHER; note = 2'-O-methylguanosine-3'-phosphate
  modified_base 12: mod_base = OTHER; note = 2'-O-methylcytidine-3'-phosphate
  modified_base 13: mod_base = OTHER; note = 2'-O-methyluridine-3'-phosphate
  modified_base 14: mod_base = OTHER; note = 2'-deoxy-2'-fluorouridine-3'-phosphate
  modified_base 15: mod_base = OTHER; note = 2'-O-methyluridine-3'-phosphate
  modified_base 16: mod_base = OTHER; note = 2'-deoxy-2'-fluoroadenosine-3'-phosphate
  modified_base 17: mod_base = OTHER; note = 2'-O-methyluridine-3'-phosphate
  modified_base 18: mod_base = OTHER; note = 2'-O-methyladenosine-3'-phosphate
  modified_base 19: mod_base = OTHER; note = 2'-O-methylguanosine-3'-phosphate
  modified_base 20: mod_base = OTHER; note = 2'-O-methyladenosine-3'-phosphate
  modified_base 21: mod_base = OTHER; note = 2'-O-methyladenosine-3'-phosphorothioate
  modified_base 22: mod_base = OTHER; note = 2'-O-methylcytidine-3'-phosphorothioate
  modified_base 23: mod_base = OTHER; note = 2'-O-methyladenosine
tctgtgctttgctttatagaaca

SEQ ID NO: 12725 - RNA, 23 nt, synthetic construct
  source 1..23: mol_type = other RNA
  modified_base 1: mod_base = OTHER; note = 2'-O-methyluridine-3'-phosphorothioate 5'-(E)-Vinylphosphonate
  modified_base 2: mod_base = OTHER; note = 2'-deoxy-2'-fluoroguanosine-3'-phosphorothioate
  modified_base 3: mod_base = OTHER; note = 2'-O-methylcytidine-3'-phosphate
  modified_base 4: mod_base = OTHER; note = 2'-O-methyluridine-3'-phosphate
  modified_base 5: mod_base = OTHER; note = 2'-O-methylguanosine-3'-phosphate
  modified_base 6: mod_base = OTHER; note = 2'-deoxy-2'-fluorouridine-3'-phosphate
  modified_base 7: mod_base = OTHER; note = 2'-O-methylguanosine-3'-phosphate
  modified_base 8: mod_base = OTHER; note = 2'-O-methylcytidine-3'-phosphate
  modified_base 9: mod_base = OTHER; note = 2'-O-methyluridine-3'-phosphate
  modified_base 10: mod_base = OTHER; note = 2'-O-methyluridine-3'-phosphate
  modified_base 11: mod_base = OTHER; note = 2'-O-methyluridine-3'-phosphate
  modified_base 12: mod_base = OTHER; note = 2'-O-methylguanosine-3'-phosphate
  modified_base 13: mod_base = OTHER; note = 2'-O-methylcytidine-3'-phosphate
  modified_base 14: mod_base = OTHER; note = 2'-deoxy-2'-fluorouridine-3'-phosphate
  modified_base 15: mod_base = OTHER; note = 2'-O-methyluridine-3'-phosphate
  modified_base 16: mod_base = OTHER; note = 2'-deoxy-2'-fluorouridine-3'-phosphate
  modified_base 17: mod_base = OTHER; note = 2'-O-methyladenosine-3'-phosphate
  modified_base 18: mod_base = OTHER; note = 2'-O-methyluridine-3'-phosphate
  modified_base 19: mod_base = OTHER; note = 2'-O-methyladenosine-3'-phosphate
  modified_base 20: mod_base = OTHER; note = 2'-O-methylguanosine-3'-phosphate
  modified_base 21: mod_base = OTHER; note = 2'-O-methyladenosine-3'-phosphorothioate
  modified_base 22: mod_base = OTHER; note = 2'-O-methyladenosine-3'-phosphorothioate
  modified_base 23: mod_base = OTHER; note = 2'-O-methylcytidine
tgctgtgctttgctttatagaac

SEQ ID NO: 12726 - RNA, 23 nt, synthetic construct
  source 1..23: mol_type = other RNA
  modified_base 1: mod_base = OTHER; note = 2'-O-methyluridine-3'-phosphorothioate 5'-(E)-Vinylphosphonate
  modified_base 2: mod_base = OTHER; note = 2'-deoxy-2'-fluoroadenosine-3'-phosphorothioate
  modified_base 3: mod_base = OTHER; note = 2'-O-methylguanosine-3'-phosphate
  modified_base 4: mod_base = OTHER; note = 2'-O-methylcytidine-3'-phosphate
  modified_base 5: mod_base = OTHER; note = 2'-O-methyluridine-3'-phosphate
  modified_base 6: mod_base = OTHER; note = 2'-deoxy-2'-fluoroguanosine-3'-phosphate
  modified_base 7: mod_base = OTHER; note = 2'-O-methyluridine-3'-phosphate
  modified_base 8: mod_base = OTHER; note = 2'-O-methylguanosine-3'-phosphate
  modified_base 9: mod_base = OTHER; note = 2'-O-methylcytidine-3'-phosphate
  modified_base 10: mod_base = OTHER; note = 2'-O-methyluridine-3'-phosphate
  modified_base 11: mod_base = OTHER; note = 2'-O-methyluridine-3'-phosphate
  modified_base 12: mod_base = OTHER; note = 2'-O-methyluridine-3'-phosphate
  modified_base 13: mod_base = OTHER; note = 2'-O-methylguanosine-3'-phosphate
  modified_base 14: mod_base = OTHER; note = 2'-deoxy-2'-fluorocytidine-3'-phosphate
  modified_base 15: mod_base = OTHER; note = 2'-O-methyluridine-3'-phosphate
  modified_base 16: mod_base = OTHER; note = 2'-deoxy-2'-fluorouridine-3'-phosphate
  modified_base 17: mod_base = OTHER; note = 2'-O-methyluridine-3'-phosphate
  modified_base 18: mod_base = OTHER; note = 2'-O-methyladenosine-3'-phosphate
  modified_base 19: mod_base = OTHER; note = 2'-O-methyluridine-3'-phosphate
  modified_base 20: mod_base = OTHER; note = 2'-O-methyladenosine-3'-phosphate
  modified_base 21: mod_base = OTHER; note = 2'-O-methylguanosine-3'-phosphorothioate
  modified_base 22: mod_base = OTHER; note = 2'-O-methyladenosine-3'-phosphorothioate
  modified_base 23: mod_base = OTHER; note = 2'-O-methyladenosine
tagctgtgctttgctttatagaa

SEQ ID NO: 12727 - RNA, 23 nt, synthetic construct
  source 1..23: mol_type = other RNA
  modified_base 1: mod_base = OTHER; note = 2'-O-methyluridine-3'-phosphorothioate 5'-(E)-Vinylphosphonate
  modified_base 2: mod_base = OTHER; note = 2'-deoxy-2'-fluoroadenosine-3'-phosphorothioate
  modified_base 3: mod_base = OTHER; note = 2'-O-methyladenosine-3'-phosphate
  modified_base 4: mod_base = OTHER; note = 2'-O-methylguanosine-3'-phosphate
  modified_base 5: mod_base = OTHER; note = 2'-O-methylcytidine-3'-phosphate
  modified_base 6: mod_base = OTHER; note = 2'-deoxy-2'-fluorouridine-3'-phosphate
  modified_base 7: mod_base = OTHER; note = 2'-O-methylguanosine-3'-phosphate
  modified_base 8: mod_base = OTHER; note = 2'-O-methyluridine-3'-phosphate
  modified_base 9: mod_base = OTHER; note = 2'-O-methylguanosine-3'-phosphate
  modified_base 10: mod_base = OTHER; note = 2'-O-methylcytidine-3'-phosphate
  modified_base 11: mod_base = OTHER; note = 2'-O-methyluridine-3'-phosphate
  modified_base 12: mod_base = OTHER; note = 2'-O-methyluridine-3'-phosphate
  modified_base 13: mod_base = OTHER; note = 2'-O-methyluridine-3'-phosphate
  modified_base 14: mod_base = OTHER; note = 2'-deoxy-2'-fluoroguanosine-3'-phosphate
  modified_base 15: mod_base = OTHER; note = 2'-O-methylcytidine-3'-phosphate
  modified_base 16: mod_base = OTHER; note = 2'-deoxy-2'-fluorouridine-3'-phosphate
  modified_base 17: mod_base = OTHER; note = 2'-O-methyluridine-3'-phosphate
  modified_base 18: mod_base = OTHER; note = 2'-O-methyluridine-3'-phosphate
  modified_base 19: mod_base = OTHER; note = 2'-O-methyladenosine-3'-phosphate
  modified_base 20: mod_base = OTHER; note = 2'-O-methyluridine-3'-phosphate
  modified_base 21: mod_base = OTHER; note = 2'-O-methyladenosine-3'-phosphorothioate
  modified_base 22: mod_base = OTHER; note = 2'-O-methylguanosine-3'-phosphorothioate
  modified_base 23: mod_base = OTHER; note = 2'-O-methyladenosine
taagctgtgctttgctttataga

SEQ ID NO: 12728 - RNA, 23 nt, synthetic construct
  source 1..23: mol_type = other RNA
  modified_base 1: mod_base = OTHER; note = 2'-O-methyluridine-3'-phosphorothioate 5'-(E)-Vinylphosphonate
  modified_base 2: mod_base = OTHER; note = 2'-deoxy-2'-fluoroadenosine-3'-phosphorothioate
  modified_base 3: mod_base = OTHER; note = 2'-O-methylguanosine-3'-phosphate
  modified_base 4: mod_base = OTHER; note = 2'-O-methyladenosine-3'-phosphate
  modified_base 5: mod_base = OTHER; note = 2'-O-methyladenosine-3'-phosphate
  modified_base 6: mod_base = OTHER; note = 2'-deoxy-2'-fluoroguanosine-3'-phosphate
  modified_base 7: mod_base = OTHER; note = 2'-O-methyluridine-3'-phosphate
  modified_base 8: mod_base = OTHER; note = 2'-O-methyladenosine-3'-phosphate
  modified_base 9: mod_base = OTHER; note = 2'-O-methyluridine-3'-phosphate
  modified_base 10: mod_base = OTHER; note = 2'-O-methyladenosine-3'-phosphate
  modified_base 11: mod_base = OTHER; note = 2'-O-methyluridine-3'-phosphate
  modified_base 12: mod_base = OTHER; note = 2'-O-methylcytidine-3'-phosphate
  modified_base 13: mod_base = OTHER; note = 2'-O-methylcytidine-3'-phosphate
  modified_base 14: mod_base = OTHER; note = 2'-deoxy-2'-fluorouridine-3'-phosphate
  modified_base 15: mod_base = OTHER; note = 2'-O-methyluridine-3'-phosphate
  modified_base 16: mod_base = OTHER; note = 2'-deoxy-2'-fluorocytidine-3'-phosphate
  modified_base 17: mod_base = OTHER; note = 2'-O-methyladenosine-3'-phosphate
  modified_base 18: mod_base = OTHER; note = 2'-O-methylguanosine-3'-phosphate
  modified_base 19: mod_base = OTHER; note = 2'-O-methyladenosine-3'-phosphate
  modified_base 20: mod_base = OTHER; note = 2'-O-methyladenosine-3'-phosphate
  modified_base 21: mod_base = OTHER; note = 2'-O-methylcytidine-3'-phosphorothioate
  modified_base 22: mod_base = OTHER; note = 2'-O-methylguanosine-3'-phosphorothioate
  modified_base 23: mod_base = OTHER; note = 2'-O-methylcytidine
tagaagtatatccttcagaacgc

SEQ ID NO: 12729 - RNA, 23 nt, synthetic construct
  source 1..23: mol_type = other RNA
  modified_base 1: mod_base = OTHER; note = 2'-O-methyluridine-3'-phosphorothioate 5'-(E)-Vinylphosphonate
  modified_base 2: mod_base = OTHER; note = 2'-deoxy-2'-fluorouridine-3'-phosphorothioate
  modified_base 3: mod_base = OTHER; note = 2'-O-methyladenosine-3'-phosphate
  modified_base 4: mod_base = OTHER; note = 2'-O-methylcytidine-3'-phosphate
  modified_base 5: mod_base = OTHER; note = 2'-O-methyluridine-3'-phosphate
  modified_base 6: mod_base = OTHER; note = 2'-deoxy-2'-fluorocytidine-3'-phosphate
  modified_base 7: mod_base = OTHER; note = 2'-O-methyluridine-3'-phosphate
  modified_base 8: mod_base = OTHER; note = 2'-O-methyladenosine-3'-phosphate
  modified_base 9: mod_base = OTHER; note = 2'-O-methyluridine-3'-phosphate
  modified_base 10: mod_base = OTHER; note = 2'-O-methylguanosine-3'-phosphate
  modified_base 11: mod_base = OTHER; note = 2'-O-methyladenosine-3'-phosphate
  modified_base 12: mod_base = OTHER; note = 2'-O-methylguanosine-3'-phosphate
  modified_base 13: mod_base = OTHER; note = 2'-O-methyladenosine-3'-phosphate
  modified_base 14: mod_base = OTHER; note = 2'-deoxy-2'-fluoroadenosine-3'-phosphate
  modified_base 15: mod_base = OTHER; note = 2'-O-methyladenosine-3'-phosphate
  modified_base 16: mod_base = OTHER; note = 2'-deoxy-2'-fluoroadenosine-3'-phosphate
  modified_base 17: mod_base = OTHER; note = 2'-O-methyluridine-3'-phosphate
  modified_base 18: mod_base = OTHER; note = 2'-O-methyladenosine-3'-phosphate
  modified_base 19: mod_base = OTHER; note = 2'-O-methylcytidine-3'-phosphate
  modified_base 20: mod_base = OTHER; note = 2'-O-methyladenosine-3'-phosphate
  modified_base 21: mod_base = OTHER; note = 2'-O-methylguanosine-3'-phosphorothioate
  modified_base 22: mod_base = OTHER; note = 2'-O-methyladenosine-3'-phosphorothioate
  modified_base 23: mod_base = OTHER; note = 2'-O-methyladenosine
ttactctatgagaaaatacagaa

SEQ ID NO: 12730 - RNA, 23 nt, synthetic construct
  source 1..23: mol_type = other RNA
  modified_base 1: mod_base = OTHER; note = 2'-O-methyluridine-3'-phosphorothioate 5'-(E)-Vinylphosphonate
  modified_base 2: mod_base = OTHER; note = 2'-deoxy-2'-fluoroguanosine-3'-phosphorothioate
  modified_base 3: mod_base = OTHER; note = 2'-O-methyladenosine-3'-phosphate
  modified_base 4: mod_base = OTHER; note = 2'-O-methyladenosine-3'-phosphate
  modified_base 5: mod_base = OTHER; note = 2'-O-methylcytidine-3'-phosphate
  modified_base 6: mod_base = OTHER; note = 2'-deoxy-2'-fluoroguanosine-3'-phosphate
  modified_base 7: mod_base = OTHER; note = 2'-O-methylcytidine-3'-phosphate
  modified_base 8: mod_base = OTHER; note = 2'-O-methyluridine-3'-phosphate
  modified_base 9: mod_base = OTHER; note = 2'-O-methyladenosine-3'-phosphate
  modified_base 10: mod_base = OTHER; note = 2'-O-methyluridine-3'-phosphate
  modified_base 11: mod_base = OTHER; note = 2'-O-methyluridine-3'-phosphate
  modified_base 12: mod_base = OTHER; note = 2'-O-methyladenosine-3'-phosphate
  modified_base 13: mod_base = OTHER; note = 2'-O-methylcytidine-3'-phosphate
  modified_base 14: mod_base = OTHER; note = 2'-deoxy-2'-fluorocytidine-3'-phosphate
  modified_base 15: mod_base = OTHER; note = 2'-O-methylcytidine-3'-phosphate
  modified_base 16: mod_base = OTHER; note = 2'-deoxy-2'-fluoroadenosine-3'-phosphate
  modified_base 17: mod_base = OTHER; note = 2'-O-methyladenosine-3'-phosphate
  modified_base 18: mod_base = OTHER; note = 2'-O-methylguanosine-3'-phosphate
  modified_base 19: mod_base = OTHER; note = 2'-O-methylcytidine-3'-phosphate
  modified_base 20: mod_base = OTHER; note = 2'-O-methyluridine-3'-phosphate
  modified_base 21: mod_base = OTHER; note = 2'-O-methylguanosine-3'-phosphorothioate
  modified_base 22: mod_base = OTHER; note = 2'-O-methyluridine-3'-phosphorothioate
  modified_base 23: mod_base = OTHER; note = 2'-O-methylguanosine
tgaacgctattacccaagctgtg

SEQ ID NO: 12731 - RNA, 23 nt, synthetic construct
  source 1..23: mol_type = other RNA
  modified_base 1: mod_base = OTHER; note = 2'-O-methyluridine-3'-phosphorothioate 5'-(E)-Vinylphosphonate
  modified_base 2: mod_base = OTHER; note = 2'-deoxy-2'-fluoroadenosine-3'-phosphorothioate
  modified_base 3: mod_base = OTHER; note = 2'-O-methylguanosine-3'-phosphate
  modified_base 4: mod_base = OTHER; note = 2'-O-methyladenosine-3'-phosphate
  modified_base 5: mod_base = OTHER; note = 2'-O-methyladenosine-3'-phosphate
  modified_base 6: mod_base = OTHER; note = 2'-deoxy-2'-fluorocytidine-3'-phosphate
  modified_base 7: mod_base = OTHER; note = 2'-O-methylguanosine-3'-phosphate
  modified_base 8: mod_base = OTHER; note = 2'-O-methylcytidine-3'-phosphate
  modified_base 9: mod_base = OTHER; note = 2'-O-methyluridine-3'-phosphate
  modified_base 10: mod_base = OTHER; note = 2'-O-methyladenosine-3'-phosphate
  modified_base 11: mod_base = OTHER; note = 2'-O-methyluridine-3'-phosphate
  modified_base 12: mod_base = OTHER; note = 2'-O-methyluridine-3'-phosphate
  modified_base 13: mod_base = OTHER; note = 2'-O-methyladenosine-3'-phosphate
  modified_base 14: mod_base = OTHER; note = 2'-deoxy-2'-fluorocytidine-3'-phosphate
  modified_base 15: mod_base = OTHER; note = 2'-O-methylcytidine-3'-phosphate
  modified_base 16: mod_base = OTHER; note = 2'-deoxy-2'-fluorocytidine-3'-phosphate
  modified_base 17: mod_base = OTHER; note = 2'-O-methyladenosine-3'-phosphate
  modified_base 18: mod_base = OTHER; note = 2'-O-methyladenosine-3'-phosphate
  modified_base 19: mod_base = OTHER; note = 2'-O-methylguanosine-3'-phosphate
  modified_base 20: mod_base = OTHER; note = 2'-O-methylcytidine-3'-phosphate
  modified_base 21: mod_base = OTHER; note = 2'-O-methyluridine-3'-phosphorothioate
  modified_base 22: mod_base = OTHER; note = 2'-O-methylguanosine-3'-phosphorothioate
  modified_base 23: mod_base = OTHER; note = 2'-O-methyluridine
tagaacgctattacccaagctgt

SEQ ID NO: 12732 - RNA, 23 nt, synthetic construct
  source 1..23: mol_type = other RNA
  modified_base 1: mod_base = OTHER; note = 2'-O-methyluridine-3'-phosphorothioate 5'-(E)-Vinylphosphonate
  modified_base 2: mod_base = OTHER; note = 2'-deoxy-2'-fluorocytidine-3'-phosphorothioate
  modified_base 3: mod_base = OTHER; note = 2'-O-methyladenosine-3'-phosphate
  modified_base 4: mod_base = OTHER; note = 2'-O-methylguanosine-3'-phosphate
  modified_base 5: mod_base = OTHER; note = 2'-O-methyladenosine-3'-phosphate
  modified_base 6: mod_base = OTHER; note = 2'-deoxy-2'-fluoroadenosine-3'-phosphate
  modified_base 7: mod_base = OTHER; note = 2'-O-methylcytidine-3'-phosphate
  modified_base 8: mod_base = OTHER; note = 2'-O-methylguanosine-3'-phosphate
  modified_base 9: mod_base = OTHER; note = 2'-O-methylcytidine-3'-phosphate
  modified_base 10: mod_base = OTHER; note = 2'-O-methyluridine-3'-phosphate
  modified_base 11: mod_base = OTHER; note = 2'-O-methyladenosine-3'-phosphate
  modified_base 12: mod_base = OTHER; note = 2'-O-methyluridine-3'-phosphate
  modified_base 13: mod_base = OTHER; note = 2'-O-methyluridine-3'-phosphate
  modified_base 14: mod_base = OTHER; note = 2'-deoxy-2'-fluoroadenosine-3'-phosphate
  modified_base 15: mod_base = OTHER; note = 2'-O-methylcytidine-3'-phosphate
  modified_base 16: mod_base = OTHER; note = 2'-deoxy-2'-fluorocytidine-3'-phosphate
  modified_base 17: mod_base = OTHER; note = 2'-O-methylcytidine-3'-phosphate
  modified_base 18: mod_base = OTHER; note = 2'-O-methyladenosine-3'-phosphate
  modified_base 19: mod_base = OTHER; note = 2'-O-methyladenosine-3'-phosphate
  modified_base 20: mod_base = OTHER; note = 2'-O-methylguanosine-3'-phosphate
  modified_base 21: mod_base = OTHER; note = 2'-O-methylcytidine-3'-phosphorothioate
  modified_base 22: mod_base = OTHER; note = 2'-O-methyluridine-3'-phosphorothioate
  modified_base 23: mod_base = OTHER; note = 2'-O-methylguanosine
tcagaacgctattacccaagctg

SEQ ID NO: 12733 - RNA, 23 nt, synthetic construct
  source 1..23: mol_type = other RNA
  modified_base 1: mod_base = OTHER; note = 2'-O-methyluridine-3'-phosphorothioate 5'-(E)-Vinylphosphonate
  modified_base 2: mod_base = OTHER; note = 2'-deoxy-2'-fluorouridine-3'-phosphorothioate
  modified_base 3: mod_base = OTHER; note = 2'-O-methylcytidine-3'-phosphate
  modified_base 4: mod_base = OTHER; note = 2'-O-methyladenosine-3'-phosphate
  modified_base 5: mod_base = OTHER; note = 2'-O-methylguanosine-3'-phosphate
  modified_base 6: mod_base = OTHER; note = 2'-deoxy-2'-fluoroadenosine-3'-phosphate
  modified_base 7: mod_base = OTHER; note = 2'-O-methyladenosine-3'-phosphate
  modified_base 8: mod_base = OTHER; note = 2'-O-methylcytidine-3'-phosphate
  modified_base 9: mod_base = OTHER; note = 2'-O-methylguanosine-3'-phosphate
  modified_base 10: mod_base = OTHER; note = 2'-O-methylcytidine-3'-phosphate
  modified_base 11: mod_base = OTHER; note = 2'-O-methyluridine-3'-phosphate
  modified_base 12: mod_base = OTHER; note = 2'-O-methyladenosine-3'-phosphate
  modified_base 13: mod_base = OTHER; note = 2'-O-methyluridine-3'-phosphate
  modified_base 14: mod_base = OTHER; note = 2'-deoxy-2'-fluorouridine-3'-phosphate
  modified_base 15: mod_base = OTHER; note = 2'-O-methyladenosine-3'-phosphate
  modified_base 16: mod_base = OTHER; note = 2'-deoxy-2'-fluorocytidine-3'-phosphate
  modified_base 17: mod_base = OTHER; note = 2'-O-methylcytidine-3'-phosphate
  modified_base 18: mod_base = OTHER; note = 2'-O-methylcytidine-3'-phosphate
  modified_base 19: mod_base = OTHER; note = 2'-O-methyladenosine-3'-phosphate
  modified_base 20: mod_base = OTHER; note = 2'-O-methyladenosine-3'-phosphate
  modified_base 21: mod_base = OTHER; note = 2'-O-methylguanosine-3'-phosphorothioate
  modified_base 22: mod_base = OTHER; note = 2'-O-methylcytidine-3'-phosphorothioate
  modified_base 23: mod_base = OTHER; note = 2'-O-methyluridine
ttcagaacgctattacccaagct

SEQ ID NO: 12734 - RNA, 23 nt, synthetic construct
  source 1..23: mol_type = other RNA
  modified_base 1: mod_base = OTHER; note = 2'-O-methyluridine-3'-phosphorothioate 5'-(E)-Vinylphosphonate
  modified_base 2: mod_base = OTHER; note = 2'-deoxy-2'-fluorouridine-3'-phosphorothioate
  modified_base 3: mod_base = OTHER; note = 2'-O-methyluridine-3'-phosphate
  modified_base 4: mod_base = OTHER; note = 2'-O-methylcytidine-3'-phosphate
  modified_base 5: mod_base = OTHER; note = 2'-O-methyladenosine-3'-phosphate
  modified_base 6: mod_base = OTHER; note = 2'-deoxy-2'-fluoroguanosine-3'-phosphate
  modified_base 7: mod_base = OTHER; note = 2'-O-methyladenosine-3'-phosphate
  modified_base 8: mod_base = OTHER; note = 2'-O-methyladenosine-3'-phosphate
  modified_base 9: mod_base = OTHER; note = 2'-O-methylcytidine-3'-phosphate
  modified_base 10: mod_base = OTHER; note = 2'-O-methylguanosine-3'-phosphate
  modified_base 11: mod_base = OTHER; note = 2'-O-methylcytidine-3'-phosphate
  modified_base 12: mod_base = OTHER; note = 2'-O-methyluridine-3'-phosphate
  modified_base 13: mod_base = OTHER; note = 2'-O-methyladenosine-3'-phosphate
  modified_base 14: mod_base = OTHER; note = 2'-deoxy-2'-fluorouridine-3'-phosphate
  modified_base 15: mod_base = OTHER; note = 2'-O-methyluridine-3'-phosphate
  modified_base 16: mod_base = OTHER; note = 2'-deoxy-2'-fluoroadenosine-3'-phosphate
  modified_base 17: mod_base = OTHER; note = 2'-O-methylcytidine-3'-phosphate
  modified_base 18: mod_base = OTHER; note = 2'-O-methylcytidine-3'-phosphate
  modified_base 19: mod_base = OTHER; note = 2'-O-methylcytidine-3'-phosphate
  modified_base 20: mod_base = OTHER; note = 2'-O-methyladenosine-3'-phosphate
  modified_base 21: mod_base = OTHER; note = 2'-O-methyladenosine-3'-phosphorothioate
  modified_base 22: mod_base = OTHER; note = 2'-O-methylguanosine-3'-phosphorothioate
  modified_base 23: mod_base = OTHER; note = 2'-O-methylcytidine
tttcagaacgctattacccaagc

SEQ ID NO: 12735 - RNA, 23 nt, synthetic construct
  source 1..23: mol_type = other RNA
  modified_base 1: mod_base = OTHER; note = 2'-O-methyluridine-3'-phosphorothioate 5'-(E)-Vinylphosphonate
  modified_base 2: mod_base = OTHER; note = 2'-deoxy-2'-fluorocytidine-3'-phosphorothioate
  modified_base 3: mod_base = OTHER; note = 2'-O-methyluridine-3'-phosphate
  modified_base 4: mod_base = OTHER; note = 2'-O-methyluridine-3'-phosphate
  modified_base 5: mod_base = OTHER; note = 2'-O-methylcytidine-3'-phosphate
  modified_base 6: mod_base = OTHER; note = 2'-deoxy-2'-fluoroadenosine-3'-phosphate
  modified_base 7: mod_base = OTHER; note = 2'-O-methylguanosine-3'-phosphate
  modified_base 8: mod_base = OTHER; note = 2'-O-methyladenosine-3'-phosphate
  modified_base 9: mod_base = OTHER; note = 2'-O-methyladenosine-3'-phosphate
  modified_base 10: mod_base = OTHER; note = 2'-O-methylcytidine-3'-phosphate
  modified_base 11: mod_base = OTHER; note = 2'-O-methylguanosine-3'-phosphate
  modified_base 12: mod_base = OTHER; note = 2'-O-methylcytidine-3'-phosphate
  modified_base 13: mod_base = OTHER; note = 2'-O-methyluridine-3'-phosphate
  modified_base 14: mod_base = OTHER; note = 2'-deoxy-2'-fluoroadenosine-3'-phosphate
  modified_base 15: mod_base = OTHER; note = 2'-O-methyluridine-3'-phosphate
  modified_base 16: mod_base = OTHER; note = 2'-deoxy-2'-fluorouridine-3'-phosphate
  modified_base 17: mod_base = OTHER; note = 2'-O-methyladenosine-3'-phosphate
  modified_base 18: mod_base = OTHER; note = 2'-O-methylcytidine-3'-phosphate
  modified_base 19: mod_base = OTHER; note = 2'-O-methylcytidine-3'-phosphate
  modified_base 20: mod_base = OTHER; note = 2'-O-methylcytidine-3'-phosphate
  modified_base 21: mod_base = OTHER; note = 2'-O-methyladenosine-3'-phosphorothioate
  modified_base 22: mod_base = OTHER; note = 2'-O-methyladenosine-3'-phosphorothioate
  modified_base 23: mod_base = OTHER; note = 2'-O-methylguanosine
tcttcagaacgctattacccaag

SEQ ID NO: 12736 - RNA, 23 nt, synthetic construct
  source 1..23: mol_type = other RNA
  modified_base 1: mod_base = OTHER; note = 2'-O-methyluridine-3'-phosphorothioate 5'-(E)-Vinylphosphonate
  modified_base 2: mod_base = OTHER; note = 2'-deoxy-2'-fluorocytidine-3'-phosphorothioate
  modified_base 3: mod_base = OTHER; note = 2'-O-methylcytidine-3'-phosphate
  modified_base 4: mod_base = OTHER; note = 2'-O-methyluridine-3'-phosphate
  modified_base 5: mod_base = OTHER; note = 2'-O-methyluridine-3'-phosphate
  modified_base 6: mod_base = OTHER; note = 2'-deoxy-2'-fluorocytidine-3'-phosphate
  modified_base 7: mod_base = OTHER; note = 2'-O-methyladenosine-3'-phosphate
  modified_base 8: mod_base = OTHER; note = 2'-O-methylguanosine-3'-phosphate
  modified_base 9: mod_base = OTHER; note = 2'-O-methyladenosine-3'-phosphate
  modified_base 10: mod_base = OTHER; note = 2'-O-methyladenosine-3'-phosphate
  modified_base 11: mod_base = OTHER; note = 2'-O-methylcytidine-3'-phosphate
  modified_base 12: mod_base = OTHER; note = 2'-O-methylguanosine-3'-phosphate
  modified_base 13: mod_base = OTHER; note = 2'-O-methylcytidine-3'-phosphate
  modified_base 14: mod_base = OTHER; note = 2'-deoxy-2'-fluorouridine-3'-phosphate
  modified_base 15: mod_base = OTHER; note = 2'-O-methyladenosine-3'-phosphate
  modified_base 16: mod_base = OTHER; note = 2'-deoxy-2'-fluorouridine-3'-phosphate
  modified_base 17: mod_base = OTHER; note = 2'-O-methyluridine-3'-phosphate
  modified_base 18: mod_base = OTHER; note = 2'-O-methyladenosine-3'-phosphate
  modified_base 19: mod_base = OTHER; note = 2'-O-methylcytidine-3'-phosphate
  modified_base 20: mod_base = OTHER; note = 2'-O-methylcytidine-3'-phosphate
  modified_base 21: mod_base = OTHER; note = 2'-O-methylcytidine-3'-phosphorothioate
  modified_base 22: mod_base = OTHER; note = 2'-O-methyladenosine-3'-phosphorothioate
  modified_base 23: mod_base = OTHER; note = 2'-O-methyladenosine
tccttcagaacgctattacccaa

SEQ ID NO: 12737 - RNA, 23 nt, synthetic construct
  source 1..23: mol_type = other RNA
  modified_base 1: mod_base = OTHER; note = 2'-O-methyluridine-3'-phosphorothioate 5'-(E)-Vinylphosphonate
  modified_base 2: mod_base = OTHER; note = 2'-deoxy-2'-fluorouridine-3'-phosphorothioate
  modified_base 3: mod_base = OTHER; note = 2'-O-methylcytidine-3'-phosphate
  modified_base 4: mod_base = OTHER; note = 2'-O-methylcytidine-3'-phosphate
  modified_base 5: mod_base = OTHER; note = 2'-O-methyluridine-3'-phosphate
  modified_base 6: mod_base = OTHER; note = 2'-deoxy-2'-fluorouridine-3'-phosphate
  modified_base 7: mod_base = OTHER; note = 2'-O-methylcytidine-3'-phosphate
  modified_base 8: mod_base = OTHER; note = 2'-O-methyladenosine-3'-phosphate
  modified_base 9: mod_base = OTHER; note = 2'-O-methylguanosine-3'-phosphate
  modified_base 10: mod_base = OTHER; note = 2'-O-methyladenosine-3'-phosphate
  modified_base 11: mod_base = OTHER; note = 2'-O-methyladenosine-3'-phosphate
  modified_base 12: mod_base = OTHER; note = 2'-O-methylcytidine-3'-phosphate
  modified_base 13: mod_base = OTHER; note = 2'-O-methylguanosine-3'-phosphate
  modified_base 14: mod_base = OTHER; note = 2'-deoxy-2'-fluorocytidine-3'-phosphate
  modified_base 15: mod_base = OTHER; note = 2'-O-methyluridine-3'-phosphate
  modified_base 16: mod_base = OTHER; note = 2'-deoxy-2'-fluoroadenosine-3'-phosphate
  modified_base 17: mod_base = OTHER; note = 2'-O-methyluridine-3'-phosphate
  modified_base 18: mod_base = OTHER; note = 2'-O-methyluridine-3'-phosphate
  modified_base 19: mod_base = OTHER; note = 2'-O-methyladenosine-3'-phosphate
  modified_base 20: mod_base = OTHER; note = 2'-O-methylcytidine-3'-phosphate
  modified_base 21: mod_base = OTHER; note = 2'-O-methylcytidine-3'-phosphorothioate
  modified_base 22: mod_base = OTHER; note = 2'-O-methylcytidine-3'-phosphorothioate
  modified_base 23: mod_base = OTHER; note = 2'-O-methyladenosine
ttccttcagaacgctattaccca

SEQ ID NO: 12738 - RNA, 23 nt, synthetic construct
  source 1..23: mol_type = other RNA
  modified_base 1: mod_base = OTHER; note = 2'-O-methyluridine-3'-phosphorothioate 5'-(E)-Vinylphosphonate
  modified_base 2: mod_base = OTHER; note = 2'-deoxy-2'-fluoroadenosine-3'-phosphorothioate
  modified_base 3: mod_base = OTHER; note = 2'-O-methyluridine-3'-phosphate
  modified_base 4: mod_base = OTHER; note = 2'-O-methylcytidine-3'-phosphate
  modified_base 5: mod_base = OTHER; note = 2'-O-methylcytidine-3'-phosphate
  modified_base 6: mod_base = OTHER; note = 2'-deoxy-2'-fluorouridine-3'-phosphate
  modified_base 7: mod_base = OTHER; note = 2'-O-methyluridine-3'-phosphate
  modified_base 8: mod_base = OTHER; note = 2'-O-methylcytidine-3'-phosphate
  modified_base 9: mod_base = OTHER; note = 2'-O-methyladenosine-3'-phosphate
  modified_base 10: mod_base = OTHER; note = 2'-O-methylguanosine-3'-phosphate
  modified_base 11: mod_base = OTHER; note = 2'-O-methyladenosine-3'-phosphate
  modified_base 12: mod_base = OTHER; note = 2'-O-methyladenosine-3'-phosphate
  modified_base 13: mod_base = OTHER; note = 2'-O-methylcytidine-3'-phosphate
  modified_base 14: mod_base = OTHER; note = 2'-deoxy-2'-fluoroguanosine-3'-phosphate
  modified_base 15: mod_base = OTHER; note = 2'-O-methylcytidine-3'-phosphate
  modified_base 16: mod_base = OTHER; note = 2'-deoxy-2'-fluorouridine-3'-phosphate
  modified_base 17: mod_base = OTHER; note = 2'-O-methyladenosine-3'-phosphate
  modified_base 18: mod_base = OTHER; note = 2'-O-methyluridine-3'-phosphate
  modified_base 19: mod_base = OTHER; note = 2'-O-methyluridine-3'-phosphate
  modified_base 20: mod_base = OTHER; note = 2'-O-methyladenosine-3'-phosphate
  modified_base 21: mod_base = OTHER; note = 2'-O-methylcytidine-3'-phosphorothioate
  modified_base 22: mod_base = OTHER; note = 2'-O-methylcytidine-3'-phosphorothioate
  modified_base 23: mod_base = OTHER; note = 2'-O-methylcytidine
tatccttcagaacgctattaccc

SEQ ID NO: 12739 - RNA, 23 nt, synthetic construct
  source 1..23: mol_type = other RNA
  modified_base 1: mod_base = OTHER; note = 2'-O-methyluridine-3'-phosphorothioate 5'-(E)-Vinylphosphonate
  modified_base 2: mod_base = OTHER; note = 2'-deoxy-2'-fluorouridine-3'-phosphorothioate
  modified_base 3: mod_base = OTHER; note = 2'-O-methyladenosine-3'-phosphate
  modified_base 4: mod_base = OTHER; note = 2'-O-methyluridine-3'-phosphate
  modified_base 5: mod_base = OTHER; note = 2'-O-methylcytidine-3'-phosphate
  modified_base 6: mod_base = OTHER; note = 2'-deoxy-2'-fluorocytidine-3'-phosphate
  modified_base 7: mod_base = OTHER; note = 2'-O-methyluridine-3'-phosphate
  modified_base 8: mod_base = OTHER; note = 2'-O-methyluridine-3'-phosphate
  modified_base 9: mod_base = OTHER; note = 2'-O-methylcytidine-3'-phosphate
  modified_base 10: mod_base = OTHER; note = 2'-O-methyladenosine-3'-phosphate
  modified_base 11: mod_base = OTHER; note = 2'-O-methylguanosine-3'-phosphate
  modified_base 12: mod_base = OTHER; note = 2'-O-methyladenosine-3'-phosphate
  modified_base 13: mod_base = OTHER; note = 2'-O-methyladenosine-3'-phosphate
  modified_base 14: mod_base = OTHER; note = 2'-deoxy-2'-fluorocytidine-3'-phosphate
  modified_base 15: mod_base = OTHER; note = 2'-O-methylguanosine-3'-phosphate
  modified_base 16: mod_base = OTHER; note = 2'-deoxy-2'-fluorocytidine-3'-phosphate
  modified_base 17: mod_base = OTHER; note = 2'-O-methyluridine-3'-phosphate
  modified_base 18: mod_base = OTHER; note = 2'-O-methyladenosine-3'-phosphate
  modified_base 19: mod_base = OTHER; note = 2'-O-methyluridine-3'-phosphate
  modified_base 20: mod_base = OTHER; note = 2'-O-methyluridine-3'-phosphate
  modified_base 21: mod_base = OTHER; note = 2'-O-methyladenosine-3'-phosphorothioate
  modified_base 22: mod_base = OTHER; note = 2'-O-methylcytidine-3'-phosphorothioate
  modified_base 23: mod_base = OTHER; note = 2'-O-methylcytidine
ttatccttcagaacgctattacc

SEQ ID NO: 12740 - RNA, 23 nt, synthetic construct
  source 1..23: mol_type = other RNA
  modified_base 1: mod_base = OTHER; note = 2'-O-methyluridine-3'-phosphorothioate 5'-(E)-Vinylphosphonate
  modified_base 2: mod_base = OTHER; note = 2'-deoxy-2'-fluoroadenosine-3'-phosphorothioate
  modified_base 3: mod_base = OTHER; note = 2'-O-methyluridine-3'-phosphate
  modified_base 4: mod_base = OTHER; note = 2'-O-methyladenosine-3'-phosphate
  modified_base 5: mod_base = OTHER; note = 2'-O-methyluridine-3'-phosphate
  modified_base 6: mod_base = OTHER; note = 2'-deoxy-2'-fluorocytidine-3'-phosphate
  modified_base 7: mod_base = OTHER; note = 2'-O-methylcytidine-3'-phosphate
  modified_base 8: mod_base = OTHER; note = 2'-O-methyluridine-3'-phosphate
  modified_base 9: mod_base = OTHER; note = 2'-O-methyluridine-3'-phosphate
  modified_base 10: mod_base = OTHER; note = 2'-O-methylcytidine-3'-phosphate
  modified_base 11: mod_base = OTHER; note = 2'-O-methyladenosine-3'-phosphate
  modified_base 12: mod_base = OTHER; note = 2'-O-methylguanosine-3'-phosphate
  modified_base 13: mod_base = OTHER; note = 2'-O-methyladenosine-3'-phosphate
  modified_base 14: mod_base = OTHER; note = 2'-deoxy-2'-fluoroadenosine-3'-phosphate
  modified_base 15: mod_base = OTHER; note = 2'-O-methylcytidine-3'-phosphate
  modified_base 16: mod_base = OTHER; note = 2'-deoxy-2'-fluoroguanosine-3'-phosphate
  modified_base 17: mod_base = OTHER; note = 2'-O-methylcytidine-3'-phosphate
  modified_base 18: mod_base = OTHER; note = 2'-O-methyluridine-3'-phosphate
  modified_base 19: mod_base = OTHER; note = 2'-O-methyladenosine-3'-phosphate
  modified_base 20: mod_base = OTHER; note = 2'-O-methyluridine-3'-phosphate
  modified_base 21: mod_base = OTHER; note = 2'-O-methyluridine-3'-phosphorothioate
  modified_base 22: mod_base = OTHER; note = 2'-O-methyladenosine-3'-phosphorothioate
  modified_base 23: mod_base = OTHER; note = 2'-O-methylcytidine
tatatccttcagaacgctattac

SEQ ID NO: 12741 - RNA, 23 nt, synthetic construct
  source 1..23: mol_type = other RNA
  modified_base 1: mod_base = OTHER; note = 2'-O-methyluridine-3'-phosphorothioate 5'-(E)-Vinylphosphonate
  modified_base 2: mod_base = OTHER; note = 2'-deoxy-2'-fluorouridine-3'-phosphorothioate
  modified_base 3: mod_base = OTHER; note = 2'-O-methyladenosine-3'-phosphate
  modified_base 4: mod_base = OTHER; note = 2'-O-methyluridine-3'-phosphate
  modified_base 5: mod_base = OTHER; note = 2'-O-methyladenosine-3'-phosphate
  modified_base 6: mod_base = OTHER; note = 2'-deoxy-2'-fluorouridine-3'-phosphate
  modified_base 7: mod_base = OTHER; note = 2'-O-methylcytidine-3'-phosphate
  modified_base 8: mod_base = OTHER; note = 2'-O-methylcytidine-3'-phosphate
  modified_base 9: mod_base = OTHER; note = 2'-O-methyluridine-3'-phosphate
  modified_base 10: mod_base = OTHER; note = 2'-O-methyluridine-3'-phosphate
  modified_base 11: mod_base = OTHER; note = 2'-O-methylcytidine-3'-phosphate
  modified_base 12: mod_base = OTHER; note = 2'-O-methyladenosine-3'-phosphate
  modified_base 13: mod_base = OTHER; note = 2'-O-methylguanosine-3'-phosphate
  modified_base 14: mod_base = OTHER; note = 2'-deoxy-2'-fluoroadenosine-3'-phosphate
  modified_base 15: mod_base = OTHER; note = 2'-O-methyladenosine-3'-phosphate
  modified_base 16: mod_base = OTHER; note = 2'-deoxy-2'-fluorocytidine-3'-phosphate
  modified_base 17: mod_base = OTHER; note = 2'-O-methylguanosine-3'-phosphate
  modified_base 18: mod_base = OTHER; note = 2'-O-methylcytidine-3'-phosphate
  modified_base 19: mod_base = OTHER; note = 2'-O-methyluridine-3'-phosphate
  modified_base 20: mod_base = OTHER; note = 2'-O-methyladenosine-3'-phosphate
  modified_base 21: mod_base = OTHER; note = 2'-O-methyluridine-3'-phosphorothioate
  modified_base 22: mod_base = OTHER; note = 2'-O-methyluridine-3'-phosphorothioate
  modified_base 23: mod_base = OTHER; note = 2'-O-methyladenosine
ttatatccttcagaacgctatta

SEQ ID NO: 12742 - RNA, 23 nt, synthetic construct
  source 1..23: mol_type = other RNA
  modified_base 1: mod_base = OTHER; note = 2'-O-methyluridine-3'-phosphorothioate 5'-(E)-Vinylphosphonate
  modified_base 2: mod_base = OTHER; note = 2'-deoxy-2'-fluoroguanosine-3'-phosphorothioate
  modified_base 3: mod_base = OTHER; note = 2'-O-methyluridine-3'-phosphate
  modified_base 4: mod_base = OTHER; note = 2'-O-methyladenosine-3'-phosphate
  modified_base 5: mod_base = OTHER; note = 2'-O-methyluridine-3'-phosphate
  modified_base 6: mod_base = OTHER; note = 2'-deoxy-2'-fluoroadenosine-3'-phosphate
  modified_base 7: mod_base = OTHER; note = 2'-O-methyluridine-3'-phosphate
  modified_base 8: mod_base = OTHER; note = 2'-O-methylcytidine-3'-phosphate
  modified_base 9: mod_base = OTHER; note = 2'-O-methylcytidine-3'-phosphate
  modified_base 10: mod_base = OTHER; note = 2'-O-methyluridine-3'-phosphate
  modified_base 11: mod_base = OTHER; note = 2'-O-methyluridine-3'-phosphate
  modified_base 12: mod_base = OTHER; note = 2'-O-methylcytidine-3'-phosphate
  modified_base 13: mod_base = OTHER; note = 2'-O-methyladenosine-3'-phosphate
  modified_base 14: mod_base = OTHER; note = 2'-deoxy-2'-fluoroguanosine-3'-phosphate
  modified_base 15: mod_base = OTHER; note = 2'-O-methyladenosine-3'-phosphate
  modified_base 16: mod_base = OTHER; note = 2'-deoxy-2'-fluoroadenosine-3'-phosphate
  modified_base 17: mod_base = OTHER; note = 2'-O-methylcytidine-3'-phosphate
  modified_base 18: mod_base = OTHER; note = 2'-O-methylguanosine-3'-phosphate
  modified_base 19: mod_base = OTHER; note = 2'-O-methylcytidine-3'-phosphate
  modified_base 20: mod_base = OTHER; note = 2'-O-methyluridine-3'-phosphate
  modified_base 21: mod_base = OTHER; note = 2'-O-methyladenosine-3'-phosphorothioate
  modified_base 22: mod_base = OTHER; note = 2'-O-methyluridine-3'-phosphorothioate
  modified_base 23: mod_base = OTHER; note = 2'-O-methyluridine
tgtatatccttcagaacgctatt

SEQ ID NO: 12743 - RNA, 23 nt, synthetic construct
  source 1..23: mol_type = other RNA
  modified_base 1: mod_base = OTHER; note = 2'-O-methyluridine-3'-phosphorothioate 5'-(E)-Vinylphosphonate
  modified_base 2: mod_base = OTHER; note = 2'-deoxy-2'-fluoroadenosine-3'-phosphorothioate
  modified_base 3: mod_base = OTHER; note = 2'-O-methylguanosine-3'-phosphate
  modified_base 4: mod_base = OTHER; note = 2'-O-methyluridine-3'-phosphate
  modified_base 5: mod_base = OTHER; note = 2'-O-methyladenosine-3'-phosphate
  modified_base 6: mod_base = OTHER; note = 2'-deoxy-2'-fluorouridine-3'-phosphate
  modified_base 7: mod_base = OTHER; note = 2'-O-methyladenosine-3'-phosphate
  modified_base 8: mod_base = OTHER; note = 2'-O-methyluridine-3'-phosphate
  modified_base 9: mod_base = OTHER; note = 2'-O-methylcytidine-3'-phosphate
  modified_base 10: mod_base = OTHER; note = 2'-O-methylcytidine-3'-phosphate
  modified_base 11: mod_base = OTHER; note = 2'-O-methyluridine-3'-phosphate
  modified_base 12: mod_base = OTHER; note = 2'-O-methyluridine-3'-phosphate
  modified_base 13: mod_base = OTHER; note = 2'-O-methylcytidine-3'-phosphate
  modified_base 14: mod_base = OTHER; note = 2'-deoxy-2'-fluoroadenosine-3'-phosphate
  modified_base 15: mod_base = OTHER; note = 2'-O-methylguanosine-3'-phosphate
  modified_base 16: mod_base = OTHER; note = 2'-deoxy-2'-fluoroadenosine-3'-phosphate
  modified_base 17: mod_base = OTHER; note = 2'-O-methyladenosine-3'-phosphate
  modified_base 18: mod_base = OTHER; note = 2'-O-methylcytidine-3'-phosphate
  modified_base 19: mod_base = OTHER; note = 2'-O-methylguanosine-3'-phosphate
  modified_base 20: mod_base = OTHER; note = 2'-O-methylcytidine-3'-phosphate
  modified_base 21: mod_base = OTHER; note = 2'-O-methyluridine-3'-phosphorothioate
  modified_base 22: mod_base = OTHER; note = 2'-O-methyladenosine-3'-phosphorothioate
  modified_base 23: mod_base = OTHER; note = 2'-O-methyluridine
tagtatatccttcagaacgctat

SEQ ID NO: 12744 - RNA, 23 nt, synthetic construct
  source 1..23: mol_type = other RNA
  modified_base 1: mod_base = OTHER; note = 2'-O-methyluridine-3'-phosphorothioate 5'-(E)-Vinylphosphonate
  modified_base 2: mod_base = OTHER; note = 2'-deoxy-2'-fluoroadenosine-3'-phosphorothioate
  modified_base 3: mod_base = OTHER; note = 2'-O-methyladenosine-3'-phosphate
  modified_base 4: mod_base = OTHER; note = 2'-O-methylguanosine-3'-phosphate
  modified_base 5: mod_base = OTHER; note = 2'-O-methyluridine-3'-phosphate
  modified_base 6: mod_base = OTHER; note = 2'-deoxy-2'-fluoroadenosine-3'-phosphate
  modified_base 7: mod_base = OTHER; note = 2'-O-methyluridine-3'-phosphate
  modified_base 8: mod_base = OTHER; note = 2'-O-methyladenosine-3'-phosphate
  modified_base 9: mod_base = OTHER; note = 2'-O-methyluridine-3'-phosphate
  modified_base 10: mod_base = OTHER; note = 2'-O-methylcytidine-3'-phosphate
  modified_base 11: mod_base = OTHER; note = 2'-O-methylcytidine-3'-phosphate
  modified_base 12: mod_base = OTHER; note = 2'-O-methyluridine-3'-phosphate
  modified_base 13: mod_base = OTHER; note = 2'-O-methyluridine-3'-phosphate
  modified_base 14: mod_base = OTHER; note = 2'-deoxy-2'-fluorocytidine-3'-phosphate
  modified_base 15: mod_base = OTHER; note = 2'-O-methyladenosine-3'-phosphate
  modified_base 16: mod_base = OTHER; note = 2'-deoxy-2'-fluoroguanosine-3'-phosphate
  modified_base 17: mod_base = OTHER; note = 2'-O-methyladenosine-3'-phosphate
  modified_base 18: mod_base = OTHER; note = 2'-O-methyladenosine-3'-phosphate
  modified_base 19: mod_base = OTHER; note = 2'-O-methylcytidine-3'-phosphate
  modified_base 20: mod_base = OTHER; note = 2'-O-methylguanosine-3'-phosphate
  modified_base 21: mod_base = OTHER; note = 2'-O-methylcytidine-3'-phosphorothioate
  modified_base 22: mod_base = OTHER; note = 2'-O-methyluridine-3'-phosphorothioate
  modified_base 23: mod_base = OTHER; note = 2'-O-methyladenosine
taagtatatccttcagaacgcta

SEQ ID NO: 12745 - RNA, 23 nt, synthetic construct
  source 1..23: mol_type = other RNA
  modified_base 1: mod_base = OTHER; note = 2'-O-methyluridine-3'-phosphorothioate 5'-(E)-Vinylphosphonate
  modified_base 2: mod_base = OTHER; note = 2'-deoxy-2'-fluoroguanosine-3'-phosphorothioate
  modified_base 3: mod_base = OTHER; note = 2'-O-methyladenosine-3'-phosphate
  modified_base 4: mod_base = OTHER; note = 2'-O-methyladenosine-3'-phosphate
  modified_base 5: mod_base = OTHER; note = 2'-O-methylguanosine-3'-phosphate
  modified_base 6: mod_base = OTHER; note = 2'-deoxy-2'-fluorouridine-3'-phosphate
  modified_base 7: mod_base = OTHER; note = 2'-O-methyladenosine-3'-phosphate
  modified_base 8: mod_base = OTHER; note = 2'-O-methyluridine-3'-phosphate
  modified_base 9: mod_base = OTHER; note = 2'-O-methyladenosine-3'-phosphate
  modified_base 10: mod_base = OTHER; note = 2'-O-methyluridine-3'-phosphate
  modified_base 11: mod_base = OTHER; note = 2'-O-methylcytidine-3'-phosphate
  modified_base 12: mod_base = OTHER; note = 2'-O-methylcytidine-3'-phosphate
  modified_base 13: mod_base = OTHER; note = 2'-O-methyluridine-3'-phosphate
  modified_base 14: mod_base = OTHER; note = 2'-deoxy-2'-fluorouridine-3'-phosphate
  modified_base 15: mod_base = OTHER; note = 2'-O-methylcytidine-3'-phosphate
  modified_base 16: mod_base = OTHER; note = 2'-deoxy-2'-fluoroadenosine-3'-phosphate
  modified_base 17: mod_base = OTHER; note = 2'-O-methylguanosine-3'-phosphate
  modified_base 18: mod_base = OTHER; note = 2'-O-methyladenosine-3'-phosphate
  modified_base 19: mod_base = OTHER; note = 2'-O-methyladenosine-3'-phosphate
  modified_base 20: mod_base = OTHER; note = 2'-O-methylcytidine-3'-phosphate
  modified_base 21: mod_base = OTHER; note = 2'-O-methylguanosine-3'-phosphorothioate
  modified_base 22: mod_base = OTHER; note = 2'-O-methylcytidine-3'-phosphorothioate
  modified_base 23: mod_base = OTHER; note = 2'-O-methyluridine
tgaagtatatccttcagaacgct

SEQ ID NO: 12746 - RNA, 23 nt, synthetic construct
  source 1..23: mol_type = other RNA
  modified_base 1: mod_base = OTHER; note = 2'-O-methyluridine-3'-phosphorothioate 5'-(E)-Vinylphosphonate
  modified_base 2: mod_base = OTHER; note = 2'-deoxy-2'-fluorocytidine-3'-phosphorothioate
  modified_base 3: mod_base = OTHER; note = 2'-O-methyladenosine-3'-phosphate
  modified_base 4: mod_base = OTHER; note = 2'-O-methylguanosine-3'-phosphate
  modified_base 5: mod_base = OTHER; note = 2'-O-methyladenosine-3'-phosphate
  modified_base 6: mod_base = OTHER; note = 2'-deoxy-2'-fluoroadenosine-3'-phosphate
  modified_base 7: mod_base = OTHER; note = 2'-O-methylguanosine-3'-phosphate
  modified_base 8: mod_base = OTHER; note = 2'-O-methyluridine-3'-phosphate
  modified_base 9: mod_base = OTHER; note = 2'-O-methyladenosine-3'-phosphate
  modified_base 10: mod_base = OTHER; note = 2'-O-methyluridine-3'-phosphate
  modified_base 11: mod_base = OTHER; note = 2'-O-methyladenosine-3'-phosphate
  modified_base 12: mod_base = OTHER; note = 2'-O-methyluridine-3'-phosphate
  modified_base 13: mod_base = OTHER; note = 2'-O-methylcytidine-3'-phosphate
  modified_base 14: mod_base = OTHER; note = 2'-deoxy-2'-fluorocytidine-3'-phosphate
  modified_base 15: mod_base = OTHER; note = 2'-O-methyluridine-3'-phosphate
  modified_base 16: mod_base = OTHER; note = 2'-deoxy-2'-fluorouridine-3'-phosphate
  modified_base 17: mod_base = OTHER; note = 2'-O-methylcytidine-3'-phosphate
  modified_base 18: mod_base = OTHER; note = 2'-O-methyladenosine-3'-phosphate
  modified_base 19: mod_base = OTHER; note = 2'-O-methylguanosine-3'-phosphate
  modified_base 20: mod_base = OTHER; note = 2'-O-methyladenosine-3'-phosphate
  modified_base 21: mod_base = OTHER; note = 2'-O-methyladenosine-3'-phosphorothioate
  modified_base 22: mod_base = OTHER; note = 2'-O-methylcytidine-3'-phosphorothioate
  modified_base 23: mod_base = OTHER; note = 2'-O-methylguanosine
tcagaagtatatccttcagaacg

SEQ ID NO: 12747 - RNA, 23 nt, synthetic construct
  source 1..23: mol_type = other RNA
  modified_base 1: mod_base = OTHER; note = 2'-O-methyluridine-3'-phosphorothioate 5'-(E)-Vinylphosphonate
  modified_base 2: mod_base = OTHER; note = 2'-deoxy-2'-fluoroadenosine-3'-phosphorothioate
  modified_base 3: mod_base = OTHER; note = 2'-O-methylcytidine-3'-phosphate
  modified_base 4: mod_base = OTHER; note = 2'-O-methyladenosine-3'-phosphate
  modified_base 5: mod_base = OTHER; note = 2'-O-methylguanosine-3'-phosphate
  modified_base 6: mod_base = OTHER; note = 2'-deoxy-2'-fluoroadenosine-3'-phosphate
  modified_base 7: mod_base = OTHER; note = 2'-O-methyladenosine-3'-phosphate
  modified_base 8: mod_base = OTHER; note = 2'-O-methylguanosine-3'-phosphate
  modified_base 9: mod_base = OTHER; note = 2'-O-methyluridine-3'-phosphate
  modified_base 10: mod_base = OTHER; note = 2'-O-methyladenosine-3'-phosphate
  modified_base 11: mod_base = OTHER; note = 2'-O-methyluridine-3'-phosphate
  modified_base 12: mod_base = OTHER; note = 2'-O-methyladenosine-3'-phosphate
  modified_base 13: mod_base = OTHER; note = 2'-O-methyluridine-3'-phosphate
  modified_base 14: mod_base = OTHER; note = 2'-deoxy-2'-fluorocytidine-3'-phosphate
  modified_base 15: mod_base = OTHER; note = 2'-O-methylcytidine-3'-phosphate
  modified_base 16: mod_base = OTHER; note = 2'-deoxy-2'-fluorouridine-3'-phosphate
  modified_base 17: mod_base = OTHER; note = 2'-O-methyluridine-3'-phosphate
  modified_base 18: mod_base = OTHER; note = 2'-O-methylcytidine-3'-phosphate
  modified_base 19: mod_base = OTHER; note = 2'-O-methyladenosine-3'-phosphate
  modified_base 20: mod_base = OTHER; note = 2'-O-methylguanosine-3'-phosphate
  modified_base 21: mod_base = OTHER; note = 2'-O-methyladenosine-3'-phosphorothioate
  modified_base 22: mod_base = OTHER; note = 2'-O-methyladenosine-3'-phosphorothioate
  modified_base 23: mod_base = OTHER; note = 2'-O-methylcytidine
tacagaagtatatccttcagaac

SEQ ID NO: 12748 - RNA, 23 nt, synthetic construct
  source 1..23: mol_type = other RNA
  modified_base 1: mod_base = OTHER; note = 2'-O-methyluridine-3'-phosphorothioate 5'-(E)-Vinylphosphonate
  modified_base 2: mod_base = OTHER; note = 2'-deoxy-2'-fluorouridine-3'-phosphorothioate
  modified_base 3: mod_base = OTHER; note = 2'-O-methyladenosine-3'-phosphate
  modified_base 4: mod_base = OTHER; note = 2'-O-methylcytidine-3'-phosphate
  modified_base 5: mod_base = OTHER; note = 2'-O-methyladenosine-3'-phosphate
  modified_base 6: mod_base = OTHER; note = 2'-deoxy-2'-fluoroguanosine-3'-phosphate
  modified_base 7: mod_base = OTHER; note = 2'-O-methyladenosine-3'-phosphate
  modified_base 8: mod_base = OTHER; note = 2'-O-methyladenosine-3'-phosphate
  modified_base 9: mod_base = OTHER; note = 2'-O-methylguanosine-3'-phosphate
  modified_base 10: mod_base = OTHER; note = 2'-O-methyluridine-3'-phosphate
  modified_base 11: mod_base = OTHER; note = 2'-O-methyladenosine-3'-phosphate
  modified_base 12: mod_base = OTHER; note = 2'-O-methyluridine-3'-phosphate
  modified_base 13: mod_base = OTHER; note = 2'-O-methyladenosine-3'-phosphate
  modified_base 14: mod_base = OTHER; note = 2'-deoxy-2'-fluorouridine-3'-phosphate
  modified_base 15: mod_base = OTHER; note = 2'-O-methylcytidine-3'-phosphate
  modified_base 16: mod_base = OTHER; note = 2'-deoxy-2'-fluorocytidine-3'-phosphate
  modified_base 17: mod_base = OTHER; note = 2'-O-methyluridine-3'-phosphate
  modified_base 18: mod_base = OTHER; note = 2'-O-methyluridine-3'-phosphate
  modified_base 19: mod_base = OTHER; note = 2'-O-methylcytidine-3'-phosphate
  modified_base 20: mod_base = OTHER; note = 2'-O-methyladenosine-3'-phosphate
  modified_base 21: mod_base = OTHER; note = 2'-O-methylguanosine-3'-phosphorothioate
  modified_base 22: mod_base = OTHER; note = 2'-O-methyladenosine-3'-phosphorothioate
  modified_base 23: mod_base = OTHER; note = 2'-O-methyladenosine
ttacagaagtatatccttcagaa

SEQ ID NO: 12749 - RNA, 23 nt, synthetic construct
  source 1..23: mol_type = other RNA
  modified_base 1: mod_base = OTHER; note = 2'-O-methyluridine-3'-phosphorothioate 5'-(E)-Vinylphosphonate
  modified_base 2: mod_base = OTHER; note = 2'-deoxy-2'-fluoroadenosine-3'-phosphorothioate
  modified_base 3: mod_base = OTHER; note = 2'-O-methyluridine-3'-phosphate
  modified_base 4: mod_base = OTHER; note = 2'-O-methyladenosine-3'-phosphate
  modified_base 5: mod_base = OTHER; note = 2'-O-methylcytidine-3'-phosphate
  modified_base 6: mod_base = OTHER; note = 2'-deoxy-2'-fluoroadenosine-3'-phosphate
  modified_base 7: mod_base = OTHER; note = 2'-O-methylguanosine-3'-phosphate
  modified_base 8: mod_base = OTHER; note = 2'-O-methyladenosine-3'-phosphate
  modified_base 9: mod_base = OTHER; note = 2'-O-methyladenosine-3'-phosphate
  modified_base 10: mod_base = OTHER; note = 2'-O-methylguanosine-3'-phosphate
  modified_base 11: mod_base = OTHER; note = 2'-O-methyluridine-3'-phosphate
  modified_base 12: mod_base = OTHER; note = 2'-O-methyladenosine-3'-phosphate
  modified_base 13: mod_base = OTHER; note = 2'-O-methyluridine-3'-phosphate
  modified_base 14: mod_base = OTHER; note = 2'-deoxy-2'-fluoroadenosine-3'-phosphate
  modified_base 15: mod_base = OTHER; note = 2'-O-methyluridine-3'-phosphate
  modified_base 16: mod_base = OTHER; note = 2'-deoxy-2'-fluorocytidine-3'-phosphate
  modified_base 17: mod_base = OTHER; note = 2'-O-methylcytidine-3'-phosphate
  modified_base 18: mod_base = OTHER; note = 2'-O-methyluridine-3'-phosphate
  modified_base 19: mod_base = OTHER; note = 2'-O-methyluridine-3'-phosphate
  modified_base 20: mod_base = OTHER; note = 2'-O-methylcytidine-3'-phosphate
  modified_base 21: mod_base = OTHER; note = 2'-O-methyladenosine-3'-phosphorothioate
  modified_base 22: mod_base = OTHER; note = 2'-O-methylguanosine-3'-phosphorothioate
  modified_base 23: mod_base = OTHER; note = 2'-O-methyladenosine
tatacagaagtatatccttcaga

SEQ ID NO: 12750 - RNA, 23 nt, synthetic construct
  source 1..23: mol_type = other RNA
  modified_base 1: mod_base = OTHER; note = 2'-O-methyluridine-3'-phosphorothioate 5'-(E)-Vinylphosphonate
  modified_base 2: mod_base = OTHER; note = 2'-deoxy-2'-fluoroadenosine-3'-phosphorothioate
  modified_base 3: mod_base = OTHER; note = 2'-O-methyladenosine-3'-phosphate
  modified_base 4: mod_base = OTHER; note = 2'-O-methyluridine-3'-phosphate
  modified_base 5: mod_base = OTHER; note = 2'-O-methyladenosine-3'-phosphate
  modified_base 6: mod_base = OTHER; note = 2'-deoxy-2'-fluorocytidine-3'-phosphate
  modified_base 7: mod_base = OTHER; note = 2'-O-methyladenosine-3'-phosphate
  modified_base 8: mod_base = OTHER; note = 2'-O-methylguanosine-3'-phosphate
  modified_base 9: mod_base = OTHER; note = 2'-O-methyladenosine-3'-phosphate
  modified_base 10: mod_base = OTHER; note = 2'-O-methyladenosine-3'-phosphate
  modified_base 11: mod_base = OTHER; note = 2'-O-methylguanosine-3'-phosphate
  modified_base 12: mod_base = OTHER; note = 2'-O-methyluridine-3'-phosphate
  modified_base 13: mod_base = OTHER; note = 2'-O-methyladenosine-3'-phosphate
  modified_base 14: mod_base = OTHER; note = 2'-deoxy-2'-fluorouridine-3'-phosphate
  modified_base 15: mod_base = OTHER; note = 2'-O-methyladenosine-3'-phosphate
  modified_base 16: mod_base = OTHER; note = 2'-deoxy-2'-fluorouridine-3'-phosphate
  modified_base 17: mod_base = OTHER; note = 2'-O-methylcytidine-3'-phosphate
  modified_base 18: mod_base = OTHER; note = 2'-O-methylcytidine-3'-phosphate
  modified_base 19: mod_base = OTHER; note = 2'-O-methyluridine-3'-phosphate
  modified_base 20: mod_base = OTHER; note = 2'-O-methyluridine-3'-phosphate
  modified_base 21: mod_base = OTHER; note = 2'-O-methylcytidine-3'-phosphorothioate
  modified_base 22: mod_base = OTHER; note = 2'-O-methyladenosine-3'-phosphorothioate
  modified_base 23: mod_base = OTHER; note = 2'-O-methylguanosine
taatacagaagtatatccttcag

SEQ ID NO: 12751 - RNA, 23 nt, synthetic construct
  source 1..23: mol_type = other RNA
  modified_base 1: mod_base = OTHER; note = 2'-O-methyluridine-3'-phosphorothioate 5'-(E)-Vinylphosphonate
  modified_base 2: mod_base = OTHER; note = 2'-deoxy-2'-fluoroadenosine-3'-phosphorothioate
  modified_base 3: mod_base = OTHER; note = 2'-O-methyladenosine-3'-phosphate
  modified_base 4: mod_base = OTHER; note = 2'-O-methyladenosine-3'-phosphate
  modified_base 5: mod_base = OTHER; note = 2'-O-methyluridine-3'-phosphate
  modified_base 6: mod_base = OTHER; note = 2'-deoxy-2'-fluoroadenosine-3'-phosphate
  modified_base 7: mod_base = OTHER; note = 2'-O-methylcytidine-3'-phosphate
  modified_base 8: mod_base = OTHER; note = 2'-O-methyladenosine-3'-phosphate
  modified_base 9: mod_base = OTHER; note = 2'-O-methylguanosine-3'-phosphate
  modified_base 10: mod_base = OTHER; note = 2'-O-methyladenosine-3'-phosphate
  modified_base 11: mod_base = OTHER; note = 2'-O-methyladenosine-3'-phosphate
  modified_base 12: mod_base = OTHER; note = 2'-O-methylguanosine-3'-phosphate
  modified_base 13: mod_base = OTHER; note = 2'-O-methyluridine-3'-phosphate
  modified_base 14: mod_base = OTHER; note = 2'-deoxy-2'-fluoroadenosine-3'-phosphate
  modified_base 15: mod_base = OTHER; note = 2'-O-methyluridine-3'-phosphate
  modified_base 16: mod_base = OTHER; note = 2'-deoxy-2'-fluoroadenosine-3'-phosphate
  modified_base 17: mod_base = OTHER; note = 2'-O-methyluridine-3'-phosphate
  modified_base 18: mod_base = OTHER; note = 2'-O-methylcytidine-3'-phosphate
  modified_base 19: mod_base = OTHER; note = 2'-O-methylcytidine-3'-phosphate
  modified_base 20: mod_base = OTHER; note = 2'-O-methyluridine-3'-phosphate
  modified_base 21: mod_base = OTHER; note = 2'-O-methyluridine-3'-phosphorothioate
  modified_base 22: mod_base = OTHER; note = 2'-O-methylcytidine-3'-phosphorothioate
  modified_base 23: mod_base = OTHER; note = 2'-O-methyladenosine
taaatacagaagtatatccttca

SEQ ID NO: 12752 - RNA, 23 nt, synthetic construct
  source 1..23: mol_type = other RNA
  modified_base 1: mod_base = OTHER; note = 2'-O-methyluridine-3'-phosphorothioate 5'-(E)-Vinylphosphonate
  modified_base 2: mod_base = OTHER; note = 2'-deoxy-2'-fluoroadenosine-3'-phosphorothioate
  modified_base 3: mod_base = OTHER; note = 2'-O-methyladenosine-3'-phosphate
  modified_base 4: mod_base = OTHER; note = 2'-O-methyladenosine-3'-phosphate
  modified_base 5: mod_base = OTHER; note = 2'-O-methyladenosine-3'-phosphate
  modified_base 6: mod_base = OTHER; note = 2'-deoxy-2'-fluorouridine-3'-phosphate
  modified_base 7: mod_base = OTHER; note = 2'-O-methyladenosine-3'-phosphate
  modified_base 8: mod_base = OTHER; note = 2'-O-methylcytidine-3'-phosphate
  modified_base 9: mod_base = OTHER; note = 2'-O-methyladenosine-3'-phosphate
  modified_base 10: mod_base = OTHER; note = 2'-O-methylguanosine-3'-phosphate
  modified_base 11: mod_base = OTHER; note = 2'-O-methyladenosine-3'-phosphate
  modified_base 12: mod_base = OTHER; note = 2'-O-methyladenosine-3'-phosphate
  modified_base 13: mod_base = OTHER; note = 2'-O-methylguanosine-3'-phosphate
  modified_base 14: mod_base = OTHER; note = 2'-deoxy-2'-fluorouridine-3'-phosphate
  modified_base 15: mod_base = OTHER; note = 2'-O-methyladenosine-3'-phosphate
  modified_base 16: mod_base = OTHER; note = 2'-deoxy-2'-fluorouridine-3'-phosphate
  modified_base 17: mod_base = OTHER; note = 2'-O-methyladenosine-3'-phosphate
  modified_base 18: mod_base = OTHER; note = 2'-O-methyluridine-3'-phosphate
  modified_base 19: mod_base = OTHER; note = 2'-O-methylcytidine-3'-phosphate
  modified_base 20: mod_base = OTHER; note = 2'-O-methylcytidine-3'-phosphate
  modified_base 21: mod_base = OTHER; note = 2'-O-methyluridine-3'-phosphorothioate
  modified_base 22: mod_base = OTHER; note = 2'-O-methyluridine-3'-phosphorothioate
  modified_base 23: mod_base = OTHER; note = 2'-O-methylcytidine
taaaatacagaagtatatccttc

SEQ ID NO: 12753 - RNA, 23 nt, synthetic construct
  source 1..23: mol_type = other RNA
  modified_base 1: mod_base = OTHER; note = 2'-O-methyluridine-3'-phosphorothioate 5'-(E)-Vinylphosphonate
  modified_base 2: mod_base = OTHER; note = 2'-deoxy-2'-fluoroguanosine-3'-phosphorothioate
  modified_base 3: mod_base = OTHER; note = 2'-O-methyladenosine-3'-phosphate
  modified_base 4: mod_base = OTHER; note = 2'-O-methyladenosine-3'-phosphate
  modified_base 5: mod_base = OTHER; note = 2'-O-methyladenosine-3'-phosphate
  modified_base 6: mod_base = OTHER; note = 2'-deoxy-2'-fluoroadenosine-3'-phosphate
  modified_base 7: mod_base = OTHER; note = 2'-O-methyluridine-3'-phosphate
  modified_base 8: mod_base = OTHER; note = 2'-O-methyladenosine-3'-phosphate
  modified_base 9: mod_base = OTHER; note = 2'-O-methylcytidine-3'-phosphate
  modified_base 10: mod_base = OTHER; note = 2'-O-methyladenosine-3'-phosphate
  modified_base 11: mod_base = OTHER; note = 2'-O-methylguanosine-3'-phosphate
  modified_base 12: mod_base = OTHER; note = 2'-O-methyladenosine-3'-phosphate
  modified_base 13: mod_base = OTHER; note = 2'-O-methyladenosine-3'-phosphate
  modified_base 14: mod_base = OTHER; note = 2'-deoxy-2'-fluoroguanosine-3'-phosphate
  modified_base 15: mod_base = OTHER; note = 2'-O-methyluridine-3'-phosphate
  modified_base 16: mod_base = OTHER; note = 2'-deoxy-2'-fluoroadenosine-3'-phosphate
  modified_base 17: mod_base = OTHER; note = 2'-O-methyluridine-3'-phosphate
  modified_base 18: mod_base = OTHER; note = 2'-O-methyladenosine-3'-phosphate
  modified_base 19: mod_base = OTHER; note = 2'-O-methyluridine-3'-phosphate
  modified_base 20: mod_base = OTHER; note = 2'-O-methylcytidine-3'-phosphate
  modified_base 21: mod_base = OTHER; note = 2'-O-methylcytidine-3'-phosphorothioate
  modified_base 22: mod_base = OTHER; note = 2'-O-methyluridine-3'-phosphorothioate
  modified_base 23: mod_base = OTHER; note = 2'-O-methyluridine
tgaaaatacagaagtatatcctt

SEQ ID NO: 12754 - RNA, 23 nt, synthetic construct
  source 1..23: mol_type = other RNA
  modified_base 1: mod_base = OTHER; note = 2'-O-methyluridine-3'-phosphorothioate 5'-(E)-Vinylphosphonate
  modified_base 2: mod_base = OTHER; note = 2'-deoxy-2'-fluoroadenosine-3'-phosphorothioate
  modified_base 3: mod_base = OTHER; note = 2'-O-methylguanosine-3'-phosphate
  modified_base 4: mod_base = OTHER; note = 2'-O-methyladenosine-3'-phosphate
  modified_base 5: mod_base = OTHER; note = 2'-O-methyladenosine-3'-phosphate
  modified_base 6: mod_base = OTHER; note = 2'-deoxy-2'-fluoroadenosine-3'-phosphate
  modified_base 7: mod_base = OTHER; note = 2'-O-methyladenosine-3'-phosphate
  modified_base 8: mod_base = OTHER; note = 2'-O-methyluridine-3'-phosphate
  modified_base 9: mod_base = OTHER; note = 2'-O-methyladenosine-3'-phosphate
  modified_base 10: mod_base = OTHER; note = 2'-O-methylcytidine-3'-phosphate
  modified_base 11: mod_base = OTHER; note = 2'-O-methyladenosine-3'-phosphate
  modified_base 12: mod_base = OTHER; note = 2'-O-methylguanosine-3'-phosphate
  modified_base 13: mod_base = OTHER; note = 2'-O-methyladenosine-3'-phosphate
  modified_base 14: mod_base = OTHER; note = 2'-deoxy-2'-fluoroadenosine-3'-phosphate
  modified_base 15: mod_base = OTHER; note = 2'-O-methylguanosine-3'-phosphate
  modified_base 16: mod_base = OTHER; note = 2'-deoxy-2'-fluorouridine-3'-phosphate
  modified_base 17: mod_base = OTHER; note = 2'-O-methyladenosine-3'-phosphate
  modified_base 18: mod_base = OTHER; note = 2'-O-methyluridine-3'-phosphate
  modified_base 19: mod_base = OTHER; note = 2'-O-methyladenosine-3'-phosphate
  modified_base 20: mod_base = OTHER; note = 2'-O-methyluridine-3'-phosphate
  modified_base 21: mod_base = OTHER; note = 2'-O-methylcytidine-3'-phosphorothioate
  modified_base 22: mod_base = OTHER; note = 2'-O-methylcytidine-3'-phosphorothioate
  modified_base 23: mod_base = OTHER; note = 2'-O-methyluridine
tagaaaatacagaagtatatcct

SEQ ID NO: 12755 - RNA, 23 nt, synthetic construct
  source 1..23: mol_type = other RNA
  modified_base 1: mod_base = OTHER; note = 2'-O-methyluridine-3'-phosphorothioate 5'-(E)-Vinylphosphonate
  modified_base 2: mod_base = OTHER; note = 2'-deoxy-2'-fluoroguanosine-3'-phosphorothioate
  modified_base 3: mod_base = OTHER; note = 2'-O-methyladenosine-3'-phosphate
  modified_base 4: mod_base = OTHER; note = 2'-O-methylguanosine-3'-phosphate
  modified_base 5: mod_base = OTHER; note = 2'-O-methyladenosine-3'-phosphate
  modified_base 6: mod_base = OTHER; note = 2'-deoxy-2'-fluoroadenosine-3'-phosphate
  modified_base 7: mod_base = OTHER; note = 2'-O-methyladenosine-3'-phosphate
  modified_base 8: mod_base = OTHER; note = 2'-O-methyladenosine-3'-phosphate
  modified_base 9: mod_base = OTHER; note = 2'-O-methyluridine-3'-phosphate
  modified_base 10: mod_base = OTHER; note = 2'-O-methyladenosine-3'-phosphate
  modified_base 11: mod_base = OTHER; note = 2'-O-methylcytidine-3'-phosphate
  modified_base 12: mod_base = OTHER; note = 2'-O-methyladenosine-3'-phosphate
  modified_base 13: mod_base = OTHER; note = 2'-O-methylguanosine-3'-phosphate
  modified_base 14: mod_base = OTHER; note = 2'-deoxy-2'-fluoroadenosine-3'-phosphate
  modified_base 15: mod_base = OTHER; note = 2'-O-methyladenosine-3'-phosphate
  modified_base 16: mod_base = OTHER; note = 2'-deoxy-2'-fluoroguanosine-3'-phosphate
  modified_base 17: mod_base = OTHER; note = 2'-O-methyluridine-3'-phosphate
  modified_base 18: mod_base = OTHER; note = 2'-O-methyladenosine-3'-phosphate
  modified_base 19: mod_base = OTHER; note = 2'-O-methyluridine-3'-phosphate
  modified_base 20: mod_base = OTHER; note = 2'-O-methyladenosine-3'-phosphate
  modified_base 21: mod_base = OTHER; note = 2'-O-methyluridine-3'-phosphorothioate
  modified_base 22: mod_base = OTHER; note = 2'-O-methylcytidine-3'-phosphorothioate
  modified_base 23: mod_base = OTHER; note = 2'-O-methylcytidine
tgagaaaatacagaagtatatcc

SEQ ID NO: 12756 - RNA, 23 nt, synthetic construct
  source 1..23: mol_type = other RNA
  modified_base 1: mod_base = OTHER; note = 2'-O-methyluridine-3'-phosphorothioate 5'-(E)-Vinylphosphonate
  modified_base 2: mod_base = OTHER; note = 2'-deoxy-2'-fluorouridine-3'-phosphorothioate
  modified_base 3: mod_base = OTHER; note = 2'-O-methylguanosine-3'-phosphate
  modified_base 4: mod_base = OTHER; note = 2'-O-methyladenosine-3'-phosphate
  modified_base 5: mod_base = OTHER; note = 2'-O-methylguanosine-3'-phosphate
  modified_base 6: mod_base = OTHER; note = 2'-deoxy-2'-fluoroadenosine-3'-phosphate
  modified_base 7: mod_base = OTHER; note = 2'-O-methyladenosine-3'-phosphate
  modified_base 8: mod_base = OTHER; note = 2'-O-methyladenosine-3'-phosphate
  modified_base 9: mod_base = OTHER; note = 2'-O-methyladenosine-3'-phosphate
  modified_base 10: mod_base = OTHER; note = 2'-O-methyluridine-3'-phosphate
  modified_base 11: mod_base = OTHER; note = 2'-O-methyladenosine-3'-phosphate
  modified_base 12: mod_base = OTHER; note = 2'-O-methylcytidine-3'-phosphate
  modified_base 13: mod_base = OTHER; note = 2'-O-methyladenosine-3'-phosphate
  modified_base 14: mod_base = OTHER; note = 2'-deoxy-2'-fluoroguanosine-3'-phosphate
  modified_base 15: mod_base = OTHER; note = 2'-O-methyladenosine-3'-phosphate
  modified_base 16: mod_base = OTHER; note = 2'-deoxy-2'-fluoroadenosine-3'-phosphate
  modified_base 17: mod_base = OTHER; note = 2'-O-methylguanosine-3'-phosphate
  modified_base 18: mod_base = OTHER; note = 2'-O-methyluridine-3'-phosphate
  modified_base 19: mod_base = OTHER; note = 2'-O-methyladenosine-3'-phosphate
  modified_base 20: mod_base = OTHER; note = 2'-O-methyluridine-3'-phosphate
  modified_base 21: mod_base = OTHER; note = 2'-O-methyladenosine-3'-phosphorothioate
  modified_base 22: mod_base = OTHER; note = 2'-O-methyluridine-3'-phosphorothioate
  modified_base 23: mod_base = OTHER; note = 2'-O-methylcytidine
ttgagaaaatacagaagtatatc

SEQ ID NO: 12757 - RNA, 23 nt, synthetic construct
  source 1..23: mol_type = other RNA
  modified_base 1: mod_base = OTHER; note = 2'-O-methyluridine-3'-phosphorothioate 5'-(E)-Vinylphosphonate
  modified_base 2: mod_base = OTHER; note = 2'-deoxy-2'-fluorocytidine-3'-phosphorothioate
  modified_base 3: mod_base = OTHER; note = 2'-O-methyluridine-3'-phosphate
  modified_base 4: mod_base = OTHER; note = 2'-O-methyladenosine-3'-phosphate
  modified_base 5: mod_base = OTHER; note = 2'-O-methyluridine-3'-phosphate
  modified_base 6: mod_base = OTHER; note = 2'-deoxy-2'-fluoroguanosine-3'-phosphate
  modified_base 7: mod_base = OTHER; note = 2'-O-methyladenosine-3'-phosphate
  modified_base 8: mod_base = OTHER; note = 2'-O-methylguanosine-3'-phosphate
  modified_base 9: mod_base = OTHER; note = 2'-O-methyladenosine-3'-phosphate
  modified_base 10: mod_base = OTHER; note = 2'-O-methyladenosine-3'-phosphate
  modified_base 11: mod_base = OTHER; note = 2'-O-methyladenosine-3'-phosphate
  modified_base 12: mod_base = OTHER; note = 2'-O-methyladenosine-3'-phosphate
  modified_base 13: mod_base = OTHER; note = 2'-O-methyluridine-3'-phosphate
  modified_base 14: mod_base = OTHER; note = 2'-deoxy-2'-fluoroadenosine-3'-phosphate
  modified_base 15: mod_base = OTHER; note = 2'-O-methylcytidine-3'-phosphate
  modified_base 16: mod_base = OTHER; note = 2'-deoxy-2'-fluoroadenosine-3'-phosphate
  modified_base 17: mod_base = OTHER; note = 2'-O-methylguanosine-3'-phosphate
  modified_base 18: mod_base = OTHER; note = 2'-O-methyladenosine-3'-phosphate
  modified_base 19: mod_base = OTHER; note = 2'-O-methyladenosine-3'-phosphate
  modified_base 20: mod_base = OTHER; note = 2'-O-methylguanosine-3'-phosphate
  modified_base 21: mod_base = OTHER; note = 2'-O-methyluridine-3'-phosphorothioate
  modified_base 22: mod_base = OTHER; note = 2'-O-methyladenosine-3'-phosphorothioate
  modified_base 23: mod_base = OTHER; note = 2'-O-methyluridine
tctatgagaaaatacagaagtat

SEQ ID NO: 12758 - RNA, 23 nt, synthetic construct
  source 1..23: mol_type = other RNA
  modified_base 1: mod_base = OTHER; note = 2'-O-methyluridine-3'-phosphorothioate 5'-(E)-Vinylphosphonate
  modified_base 2: mod_base = OTHER; note = 2'-deoxy-2'-fluorouridine-3'-phosphorothioate
  modified_base 3: mod_base = OTHER; note = 2'-O-methylcytidine-3'-phosphate
  modified_base 4: mod_base = OTHER; note = 2'-O-methyluridine-3'-phosphate
  modified_base 5: mod_base = OTHER; note = 2'-O-methyladenosine-3'-phosphate
  modified_base 6: mod_base = OTHER; note = 2'-deoxy-2'-fluorouridine-3'-phosphate
  modified_base 7: mod_base = OTHER; note = 2'-O-methylguanosine-3'-phosphate
  modified_base 8: mod_base = OTHER; note = 2'-O-methyladenosine-3'-phosphate
  modified_base 9: mod_base = OTHER; note = 2'-O-methylguanosine-3'-phosphate
  modified_base 10: mod_base = OTHER; note = 2'-O-methyladenosine-3'-phosphate
  modified_base 11: mod_base = OTHER; note = 2'-O-methyladenosine-3'-phosphate
  modified_base 12: mod_base = OTHER; note = 2'-O-methyladenosine-3'-phosphate
  modified_base 13: mod_base = OTHER; note = 2'-O-methyladenosine-3'-phosphate
  modified_base 14: mod_base = OTHER; note = 2'-deoxy-2'-fluorouridine-3'-phosphate
  modified_base 15: mod_base = OTHER; note = 2'-O-methyladenosine-3'-phosphate
  modified_base 16: mod_base = OTHER; note = 2'-deoxy-2'-fluorocytidine-3'-phosphate
  modified_base 17: mod_base = OTHER; note = 2'-O-methyladenosine-3'-phosphate
  modified_base 18: mod_base = OTHER; note = 2'-O-methylguanosine-3'-phosphate
  modified_base 19: mod_base = OTHER; note = 2'-O-methyladenosine-3'-phosphate
  modified_base 20: mod_base = OTHER; note = 2'-O-methyladenosine-3'-phosphate
  modified_base 21: mod_base = OTHER; note = 2'-O-methylguanosine-3'-phosphorothioate
  modified_base 22: mod_base = OTHER; note = 2'-O-methyluridine-3'-phosphorothioate
  modified_base 23: mod_base = OTHER; note = 2'-O-methyladenosine
ttctatgagaaaatacagaagta

SEQ ID NO: 12759 - RNA, 23 nt, synthetic construct
  source 1..23: mol_type = other RNA
  modified_base 1: mod_base = OTHER; note = 2'-O-methyluridine-3'-phosphorothioate 5'-(E)-Vinylphosphonate
  modified_base 2: mod_base = OTHER; note = 2'-deoxy-2'-fluorocytidine-3'-phosphorothioate
  modified_base 3: mod_base = OTHER; note = 2'-O-methyluridine-3'-phosphate
  modified_base 4: mod_base = OTHER; note = 2'-O-methylcytidine-3'-phosphate
  modified_base 5: mod_base = OTHER; note = 2'-O-methyluridine-3'-phosphate
  modified_base 6: mod_base = OTHER; note = 2'-deoxy-2'-fluoroadenosine-3'-phosphate
  modified_base 7: mod_base = OTHER; note = 2'-O-methyluridine-3'-phosphate
  modified_base 8: mod_base = OTHER; note = 2'-O-methylguanosine-3'-phosphate
  modified_base 9: mod_base = OTHER; note = 2'-O-methyladenosine-3'-phosphate
  modified_base 10: mod_base = OTHER; note = 2'-O-methylguanosine-3'-phosphate
  modified_base 11: mod_base = OTHER; note = 2'-O-methyladenosine-3'-phosphate
  modified_base 12: mod_base = OTHER; note = 2'-O-methyladenosine-3'-phosphate
  modified_base 13: mod_base = OTHER; note = 2'-O-methyladenosine-3'-phosphate
  modified_base 14: mod_base = OTHER; note = 2'-deoxy-2'-fluoroadenosine-3'-phosphate
  modified_base 15: mod_base = OTHER; note = 2'-O-methyluridine-3'-phosphate
  modified_base 16: mod_base = OTHER; note = 2'-deoxy-2'-fluoroadenosine-3'-phosphate
  modified_base 17: mod_base = OTHER; note = 2'-O-methylcytidine-3'-phosphate
  modified_base 18: mod_base = OTHER; note = 2'-O-methyladenosine-3'-phosphate
  modified_base 19: mod_base = OTHER; note = 2'-O-methylguanosine-3'-phosphate
  modified_base 20: mod_base = OTHER; note = 2'-O-methyladenosine-3'-phosphate
  modified_base 21: mod_base = OTHER; note = 2'-O-methyladenosine-3'-phosphorothioate
  modified_base 22: mod_base = OTHER; note = 2'-O-methylguanosine-3'-phosphorothioate
  modified_base 23: mod_base = OTHER; note = 2'-O-methyluridine
tctctatgagaaaatacagaagt

SEQ ID NO: 12760 - RNA, 23 nt, synthetic construct
  source 1..23: mol_type = other RNA
  modified_base 1: mod_base = OTHER; note = 2'-O-methyluridine-3'-phosphorothioate 5'-(E)-Vinylphosphonate
  modified_base 2: mod_base = OTHER; note = 2'-deoxy-2'-fluoroadenosine-3'-phosphorothioate
  modified_base 3: mod_base = OTHER; note = 2'-O-methylcytidine-3'-phosphate
  modified_base 4: mod_base = OTHER; note = 2'-O-methyluridine-3'-phosphate
  modified_base 5: mod_base = OTHER; note = 2'-O-methylcytidine-3'-phosphate
  modified_base 6: mod_base = OTHER; note = 2'-deoxy-2'-fluorouridine-3'-phosphate
  modified_base 7: mod_base = OTHER; note = 2'-O-methyladenosine-3'-phosphate
  modified_base 8: mod_base = OTHER; note = 2'-O-methyluridine-3'-phosphate
  modified_base 9: mod_base = OTHER; note = 2'-O-methylguanosine-3'-phosphate
  modified_base 10: mod_base = OTHER; note = 2'-O-methyladenosine-3'-phosphate
  modified_base 11: mod_base = OTHER; note = 2'-O-methylguanosine-3'-phosphate
  modified_base 12: mod_base = OTHER; note = 2'-O-methyladenosine-3'-phosphate
  modified_base 13: mod_base = OTHER; note = 2'-O-methyladenosine-3'-phosphate
  modified_base 14: mod_base = OTHER; note = 2'-deoxy-2'-fluoroadenosine-3'-phosphate
  modified_base 15: mod_base = OTHER; note = 2'-O-methyladenosine-3'-phosphate
  modified_base 16: mod_base = OTHER; note = 2'-deoxy-2'-fluorouridine-3'-phosphate
  modified_base 17: mod_base = OTHER; note = 2'-O-methyladenosine-3'-phosphate
  modified_base 18: mod_base = OTHER; note = 2'-O-methylcytidine-3'-phosphate
  modified_base 19: mod_base = OTHER; note = 2'-O-methyladenosine-3'-phosphate
  modified_base 20: mod_base = OTHER; note = 2'-O-methylguanosine-3'-phosphate
  modified_base 21: mod_base = OTHER; note = 2'-O-methyladenosine-3'-phosphorothioate
  modified_base 22: mod_base = OTHER; note = 2'-O-methyladenosine-3'-phosphorothioate
  modified_base 23: mod_base = OTHER; note = 2'-O-methylguanosine
tactctatgagaaaatacagaag

SEQ ID NO: 12761 - RNA, 23 nt, synthetic construct
  source 1..23: mol_type = other RNA
  modified_base 1: mod_base = OTHER; note = 2'-O-methyluridine-3'-phosphorothioate 5'-(E)-Vinylphosphonate
  modified_base 2: mod_base = OTHER; note = 2'-deoxy-2'-fluoroadenosine-3'-phosphorothioate
  modified_base 3: mod_base = OTHER; note = 2'-O-methylcytidine-3'-phosphate
  modified_base 4: mod_base = OTHER; note = 2'-O-methyluridine-3'-phosphate
  modified_base 5: mod_base = OTHER; note = 2'-O-methyladenosine-3'-phosphate
  modified_base 6: mod_base = OTHER; note = 2'-deoxy-2'-fluoroadenosine-3'-phosphate
  modified_base 7: mod_base = OTHER; note = 2'-O-methyladenosine-3'-phosphate
  modified_base 8: mod_base = OTHER; note = 2'-O-methyluridine-3'-phosphate
  modified_base 9: mod_base = OTHER; note = 2'-O-methyluridine-3'-phosphate
  modified_base 10: mod_base = OTHER; note = 2'-O-methylguanosine-3'-phosphate
  modified_base 11: mod_base = OTHER; note = 2'-O-methyluridine-3'-phosphate
  modified_base 12: mod_base = OTHER; note = 2'-O-methyladenosine-3'-phosphate
  modified_base 13: mod_base = OTHER; note = 2'-O-methylcytidine-3'-phosphate
  modified_base 14: mod_base = OTHER; note = 2'-deoxy-2'-fluorouridine-3'-phosphate
  modified_base 15: mod_base = OTHER; note = 2'-O-methylcytidine-3'-phosphate
  modified_base 16: mod_base = OTHER; note = 2'-deoxy-2'-fluorouridine-3'-phosphate
  modified_base 17: mod_base = OTHER; note = 2'-O-methyladenosine-3'-phosphate
  modified_base 18: mod_base = OTHER; note = 2'-O-methyluridine-3'-phosphate
  modified_base 19: mod_base = OTHER; note = 2'-O-methylguanosine-3'-phosphate
  modified_base 20: mod_base = OTHER; note = 2'-O-methyladenosine-3'-phosphate
  modified_base 21: mod_base = OTHER; note = 2'-O-methylguanosine-3'-phosphorothioate
  modified_base 22: mod_base = OTHER; note = 2'-O-methyladenosine-3'-phosphorothioate
  modified_base 23: mod_base = OTHER; note = 2'-O-methyladenosine
tactaaattgtactctatgagaa

SEQ ID NO: 12762 - RNA, 23 nt, synthetic construct
  source 1..23: mol_type = other RNA
  modified_base 1: mod_base = OTHER; note = 2'-O-methyluridine-3'-phosphorothioate 5'-(E)-Vinylphosphonate
  modified_base 2: mod_base = OTHER; note = 2'-deoxy-2'-fluorocytidine-3'-phosphorothioate
  modified_base 3: mod_base = OTHER; note = 2'-O-methyladenosine-3'-phosphate
  modified_base 4: mod_base = OTHER; note = 2'-O-methylcytidine-3'-phosphate
  modified_base 5: mod_base = OTHER; note = 2'-O-methyluridine-3'-phosphate
  modified_base 6: mod_base = OTHER; note = 2'-deoxy-2'-fluoroadenosine-3'-phosphate
  modified_base 7: mod_base = OTHER; note = 2'-O-methyladenosine-3'-phosphate
  modified_base 8: mod_base = OTHER; note = 2'-O-methyladenosine-3'-phosphate
  modified_base 9: mod_base = OTHER; note = 2'-O-methyluridine-3'-phosphate
  modified_base 10: mod_base = OTHER; note = 2'-O-methyluridine-3'-phosphate
  modified_base 11: mod_base = OTHER; note = 2'-O-methylguanosine-3'-phosphate
  modified_base 12: mod_base = OTHER; note = 2'-O-methyluridine-3'-phosphate
  modified_base 13: mod_base = OTHER; note = 2'-O-methyladenosine-3'-phosphate
  modified_base 14: mod_base = OTHER; note = 2'-deoxy-2'-fluorocytidine-3'-phosphate
  modified_base 15: mod_base = OTHER; note = 2'-O-methyluridine-3'-phosphate
  modified_base 16: mod_base = OTHER; note = 2'-deoxy-2'-fluorocytidine-3'-phosphate
  modified_base 17: mod_base = OTHER; note = 2'-O-methyluridine-3'-phosphate
  modified_base 18: mod_base = OTHER; note = 2'-O-methyladenosine-3'-phosphate
  modified_base 19: mod_base = OTHER; note = 2'-O-methyluridine-3'-phosphate
  modified_base 20: mod_base = OTHER; note = 2'-O-methylguanosine-3'-phosphate
  modified_base 21: mod_base = OTHER; note = 2'-O-methyladenosine-3'-phosphorothioate
  modified_base 22: mod_base = OTHER; note = 2'-O-methylguanosine-3'-phosphorothioate
  modified_base 23: mod_base = OTHER; note = 2'-O-methyladenosine
tcactaaattgtactctatgaga

SEQ ID NO: 12763 - RNA, 23 nt, synthetic construct
  source 1..23: mol_type = other RNA
  modified_base 1: mod_base = OTHER; note = 2'-O-methyluridine-3'-phosphorothioate 5'-(E)-Vinylphosphonate
  modified_base 2: mod_base = OTHER; note = 2'-deoxy-2'-fluorouridine-3'-phosphorothioate
  modified_base 3: mod_base = OTHER; note = 2'-O-methylcytidine-3'-phosphate
  modified_base 4: mod_base = OTHER; note = 2'-O-methyladenosine-3'-phosphate
  modified_base 5: mod_base = OTHER; note = 2'-O-methylcytidine-3'-phosphate
  modified_base 6: mod_base = OTHER; note = 2'-deoxy-2'-fluorouridine-3'-phosphate
  modified_base 7: mod_base = OTHER; note = 2'-O-methyladenosine-3'-phosphate
  modified_base 8: mod_base = OTHER; note = 2'-O-methyladenosine-3'-phosphate
  modified_base 9: mod_base = OTHER; note = 2'-O-methyladenosine-3'-phosphate
  modified_base 10: mod_base = OTHER; note = 2'-O-methyluridine-3'-phosphate
  modified_base 11: mod_base = OTHER; note = 2'-O-methyluridine-3'-phosphate
  modified_base 12: mod_base = OTHER; note = 2'-O-methylguanosine-3'-phosphate
  modified_base 13: mod_base = OTHER; note = 2'-O-methyluridine-3'-phosphate
  modified_base 14: mod_base = OTHER; note = 2'-deoxy-2'-fluoroadenosine-3'-phosphate
  modified_base 15: mod_base = OTHER; note = 2'-O-methylcytidine-3'-phosphate
  modified_base 16: mod_base = OTHER; note = 2'-deoxy-2'-fluorouridine-3'-phosphate
  modified_base 17: mod_base = OTHER; note = 2'-O-methylcytidine-3'-phosphate
  modified_base 18: mod_base = OTHER; note = 2'-O-methyluridine-3'-phosphate
  modified_base 19: mod_base = OTHER; note = 2'-O-methyladenosine-3'-phosphate
  modified_base 20: mod_base = OTHER; note = 2'-O-methyluridine-3'-phosphate
  modified_base 21: mod_base = OTHER; note = 2'-O-methylguanosine-3'-phosphorothioate
  modified_base 22: mod_base = OTHER; note = 2'-O-methyladenosine-3'-phosphorothioate
  modified_base 23: mod_base = OTHER; note = 2'-O-methylguanosine
ttcactaaattgtactctatgag

SEQ ID NO: 12764 - RNA, 23 nt, synthetic construct
  source 1..23: mol_type = other RNA
  modified_base 1: mod_base = OTHER; note = 2'-O-methyluridine-3'-phosphorothioate 5'-(E)-Vinylphosphonate
  modified_base 2: mod_base = OTHER; note = 2'-deoxy-2'-fluoroadenosine-3'-phosphorothioate
  modified_base 3: mod_base = OTHER; note = 2'-O-methyluridine-3'-phosphate
  modified_base 4: mod_base = OTHER; note = 2'-O-methylcytidine-3'-phosphate
  modified_base 5: mod_base = OTHER; note = 2'-O-methyladenosine-3'-phosphate
  modified_base 6: mod_base = OTHER; note = 2'-deoxy-2'-fluorocytidine-3'-phosphate
  modified_base 7: mod_base = OTHER; note = 2'-O-methyluridine-3'-phosphate
  modified_base 8: mod_base = OTHER; note = 2'-O-methyladenosine-3'-phosphate
  modified_base 9: mod_base = OTHER; note = 2'-O-methyladenosine-3'-phosphate
  modified_base 10: mod_base = OTHER; note = 2'-O-methyladenosine-3'-phosphate
  modified_base 11: mod_base = OTHER; note = 2'-O-methyluridine-3'-phosphate
  modified_base 12: mod_base = OTHER; note = 2'-O-methyluridine-3'-phosphate
  modified_base 13: mod_base = OTHER; note = 2'-O-methylguanosine-3'-phosphate
  modified_base 14: mod_base = OTHER; note = 2'-deoxy-2'-fluorouridine-3'-phosphate
  modified_base 15: mod_base = OTHER; note = 2'-O-methyladenosine-3'-phosphate
  modified_base 16: mod_base = OTHER; note = 2'-deoxy-2'-fluorocytidine-3'-phosphate
  modified_base 17: mod_base = OTHER; note = 2'-O-methyluridine-3'-phosphate
  modified_base 18: mod_base = OTHER; note = 2'-O-methylcytidine-3'-phosphate
  modified_base 19: mod_base = OTHER; note = 2'-O-methyluridine-3'-phosphate
  modified_base 20: mod_base = OTHER; note = 2'-O-methyladenosine-3'-phosphate
  modified_base 21: mod_base = OTHER; note = 2'-O-methyluridine-3'-phosphorothioate
  modified_base 22: mod_base = OTHER; note = 2'-O-methylguanosine-3'-phosphorothioate
  modified_base 23: mod_base = OTHER; note = 2'-O-methyladenosine
tatcactaaattgtactctatga

SEQ ID NO: 12765 - RNA, 23 nt, synthetic construct
  source 1..23: mol_type = other RNA
  modified_base 1: mod_base = OTHER; note = 2'-O-methyluridine-3'-phosphorothioate 5'-(E)-Vinylphosphonate
  modified_base 2: mod_base = OTHER; note = 2'-deoxy-2'-fluoroadenosine-3'-phosphorothioate
  modified_base 3: mod_base = OTHER; note = 2'-O-methyladenosine-3'-phosphate
  modified_base 4: mod_base = OTHER; note = 2'-O-methyluridine-3'-phosphate
  modified_base 5: mod_base = OTHER; note = 2'-O-methylcytidine-3'-phosphate
  modified_base 6: mod_base = OTHER; note = 2'-deoxy-2'-fluoroadenosine-3'-phosphate
  modified_base 7: mod_base = OTHER; note = 2'-O-methylcytidine-3'-phosphate
  modified_base 8: mod_base = OTHER; note = 2'-O-methyluridine-3'-phosphate
  modified_base 9: mod_base = OTHER; note = 2'-O-methyladenosine-3'-phosphate
  modified_base 10: mod_base = OTHER; note = 2'-O-methyladenosine-3'-phosphate
  modified_base 11: mod_base = OTHER; note = 2'-O-methyladenosine-3'-phosphate
  modified_base 12: mod_base = OTHER; note = 2'-O-methyluridine-3'-phosphate
  modified_base 13: mod_base = OTHER; note = 2'-O-methyluridine-3'-phosphate
  modified_base 14: mod_base = OTHER; note = 2'-deoxy-2'-fluoroguanosine-3'-phosphate
  modified_base 15: mod_base = OTHER; note = 2'-O-methyluridine-3'-phosphate
  modified_base 16: mod_base = OTHER; note = 2'-deoxy-2'-fluoroadenosine-3'-phosphate
  modified_base 17: mod_base = OTHER; note = 2'-O-methylcytidine-3'-phosphate
  modified_base 18: mod_base = OTHER; note = 2'-O-methyluridine-3'-phosphate
  modified_base 19: mod_base = OTHER; note = 2'-O-methylcytidine-3'-phosphate
  modified_base 20: mod_base = OTHER; note = 2'-O-methyluridine-3'-phosphate
  modified_base 21: mod_base = OTHER; note = 2'-O-methyladenosine-3'-phosphorothioate
  modified_base 22: mod_base = OTHER; note = 2'-O-methyluridine-3'-phosphorothioate
  modified_base 23: mod_base = OTHER; note = 2'-O-methylguanosine
taatcactaaattgtactctatg

SEQ ID NO: 12766 - RNA, 23 nt, synthetic construct
  source 1..23: mol_type = other RNA
  modified_base 1: mod_base = OTHER; note = 2'-O-methyluridine-3'-phosphorothioate 5'-(E)-Vinylphosphonate
  modified_base 2: mod_base = OTHER; note = 2'-deoxy-2'-fluorocytidine-3'-phosphorothioate
  modified_base 3: mod_base = OTHER; note = 2'-O-methyladenosine-3'-phosphate
  modified_base 4: mod_base = OTHER; note = 2'-O-methyluridine-3'-phosphate
  modified_base 5: mod_base = OTHER; note = 2'-O-methyladenosine-3'-phosphate
  modified_base 6: mod_base = OTHER; note = 2'-deoxy-2'-fluoroadenosine-3'-phosphate
  modified_base 7: mod_base = OTHER; note = 2'-O-methyluridine-3'-phosphate
  modified_base 8: mod_base = OTHER; note = 2'-O-methylcytidine-3'-phosphate
  modified_base 9: mod_base = OTHER; note = 2'-O-methyladenosine-3'-phosphate
  modified_base 10: mod_base = OTHER; note = 2'-O-methylcytidine-3'-phosphate
  modified_base 11: mod_base = OTHER; note = 2'-O-methyluridine-3'-phosphate
  modified_base 12: mod_base = OTHER; note = 2'-O-methyladenosine-3'-phosphate
  modified_base 13: mod_base = OTHER; note = 2'-O-methyladenosine-3'-phosphate
  modified_base 14: mod_base = OTHER; note = 2'-deoxy-2'-fluoroadenosine-3'-phosphate
  modified_base 15: mod_base = OTHER; note = 2'-O-methyluridine-3'-phosphate
  modified_base 16: mod_base = OTHER; note = 2'-deoxy-2'-fluorouridine-3'-phosphate
  modified_base 17: mod_base = OTHER; note = 2'-O-methylguanosine-3'-phosphate
  modified_base 18: mod_base = OTHER; note = 2'-O-methyluridine-3'-phosphate
  modified_base 19: mod_base = OTHER; note = 2'-O-methyladenosine-3'-phosphate
  modified_base 20: mod_base = OTHER; note = 2'-O-methylcytidine-3'-phosphate
  modified_base 21: mod_base = OTHER; note = 2'-O-methyluridine-3'-phosphorothioate
  modified_base 22: mod_base = OTHER; note = 2'-O-methylcytidine-3'-phosphorothioate
  modified_base 23: mod_base = OTHER; note = 2'-O-methyluridine
tcataatcactaaattgtactct

SEQ ID NO: 12767 - RNA, 23 nt, synthetic construct
  source 1..23: mol_type = other RNA
  modified_base 1: mod_base = OTHER; note = 2'-O-methyluridine-3'-phosphorothioate 5'-(E)-Vinylphosphonate
  modified_base 2: mod_base = OTHER; note = 2'-deoxy-2'-fluoroadenosine-3'-phosphorothioate
  modified_base 3: mod_base = OTHER; note = 2'-O-methyluridine-3'-phosphate
  modified_base 4: mod_base = OTHER; note = 2'-O-methyladenosine-3'-phosphate
  modified_base 5: mod_base = OTHER; note = 2'-O-methylguanosine-3'-phosphate
  modified_base 6: mod_base = OTHER; note = 2'-deoxy-2'-fluorouridine-3'-phosphate
  modified_base 7: mod_base = OTHER; note = 2'-O-methylguanosine-3'-phosphate
  modified_base 8: mod_base = OTHER; note = 2'-O-methyladenosine-3'-phosphate
  modified_base 9: mod_base = OTHER; note = 2'-O-methyladenosine-3'-phosphate
  modified_base 10: mod_base = OTHER; note = 2'-O-methyladenosine-3'-phosphate
  modified_base 11: mod_base = OTHER; note = 2'-O-methyluridine-3'-phosphate
  modified_base 12: mod_base = OTHER; note = 2'-O-methylguanosine-3'-phosphate
  modified_base 13: mod_base = OTHER; note = 2'-O-methyladenosine-3'-phosphate
  modified_base 14: mod_base = OTHER; note = 2'-deoxy-2'-fluoroadenosine-3'-phosphate
  modified_base 15: mod_base = OTHER; note = 2'-O-methylguanosine-3'-phosphate
  modified_base 16: mod_base = OTHER; note = 2'-deoxy-2'-fluorocytidine-3'-phosphate
  modified_base 17: mod_base = OTHER; note = 2'-O-methyladenosine-3'-phosphate
  modified_base 18: mod_base = OTHER; note = 2'-O-methyluridine-3'-phosphate
  modified_base 19: mod_base = OTHER; note = 2'-O-methyladenosine-3'-phosphate
  modified_base 20: mod_base = OTHER; note = 2'-O-methyladenosine-3'-phosphate
  modified_base 21: mod_base = OTHER; note = 2'-O-methyluridine-3'-phosphorothioate
  modified_base 22: mod_base = OTHER; note = 2'-O-methylcytidine-3'-phosphorothioate
  modified_base 23: mod_base = OTHER; note = 2'-O-methyladenosine
tatagtgaaatgaagcataatca

SEQ ID NO: 12768 - RNA, 23 nt, synthetic construct
  source 1..23: mol_type = other RNA
  modified_base 1: mod_base = OTHER; note = 2'-O-methyluridine-3'-phosphorothioate 5'-(E)-Vinylphosphonate
  modified_base 2: mod_base = OTHER; note = 2'-deoxy-2'-fluoroguanosine-3'-phosphorothioate
  modified_base 3: mod_base = OTHER; note = 2'-O-methylcytidine-3'-phosphate
  modified_base 4: mod_base = OTHER; note = 2'-O-methyladenosine-3'-phosphate
  modified_base 5: mod_base = OTHER; note = 2'-O-methyluridine-3'-phosphate
  modified_base 6: mod_base = OTHER; note = 2'-deoxy-2'-fluoroadenosine-3'-phosphate
  modified_base 7: mod_base = OTHER; note = 2'-O-methyladenosine-3'-phosphate
  modified_base 8: mod_base = OTHER; note = 2'-O-methyluridine-3'-phosphate
  modified_base 9: mod_base = OTHER; note = 2'-O-methylcytidine-3'-phosphate
  modified_base 10: mod_base = OTHER; note = 2'-O-methyladenosine-3'-phosphate
  modified_base 11: mod_base = OTHER; note = 2'-O-methylcytidine-3'-phosphate
  modified_base 12: mod_base = OTHER; note = 2'-O-methyluridine-3'-phosphate
  modified_base 13: mod_base = OTHER; note = 2'-O-methyladenosine-3'-phosphate
  modified_base 14: mod_base = OTHER; note = 2'-deoxy-2'-fluoroadenosine-3'-phosphate
  modified_base 15: mod_base = OTHER; note = 2'-O-methyladenosine-3'-phosphate
  modified_base 16: mod_base = OTHER; note = 2'-deoxy-2'-fluorouridine-3'-phosphate
  modified_base 17: mod_base = OTHER; note = 2'-O-methyluridine-3'-phosphate
  modified_base 18: mod_base = OTHER; note = 2'-O-methylguanosine-3'-phosphate
  modified_base 19: mod_base = OTHER; note = 2'-O-methyluridine-3'-phosphate
  modified_base 20: mod_base = OTHER; note = 2'-O-methyladenosine-3'-phosphate
  modified_base 21: mod_base = OTHER; note = 2'-O-methylcytidine-3'-phosphorothioate
  modified_base 22: mod_base = OTHER; note = 2'-O-methyluridine-3'-phosphorothioate
  modified_base 23: mod_base = OTHER; note = 2'-O-methylcytidine
tgcataatcactaaattgtactc

SEQ ID NO: 12769 - RNA, 23 nt, synthetic construct
  source 1..23: mol_type = other RNA
  modified_base 1: mod_base = OTHER; note = 2'-O-methyluridine-3'-phosphorothioate 5'-(E)-Vinylphosphonate
  modified_base 2: mod_base = OTHER; note = 2'-deoxy-2'-fluoroadenosine-3'-phosphorothioate
  modified_base 3: mod_base = OTHER; note = 2'-O-methylguanosine-3'-phosphate
  modified_base 4: mod_base = OTHER; note = 2'-O-methylcytidine-3'-phosphate
  modified_base 5: mod_base = OTHER; note = 2'-O-methyladenosine-3'-phosphate
  modified_base 6: mod_base = OTHER; note = 2'-deoxy-2'-fluorouridine-3'-phosphate
  modified_base 7: mod_base = OTHER; note = 2'-O-methyladenosine-3'-phosphate
  modified_base 8: mod_base = OTHER; note = 2'-O-methyladenosine-3'-phosphate
  modified_base 9: mod_base = OTHER; note = 2'-O-methyluridine-3'-phosphate
  modified_base 10: mod_base = OTHER; note = 2'-O-methylcytidine-3'-phosphate
  modified_base 11: mod_base = OTHER; note = 2'-O-methyladenosine-3'-phosphate
  modified_base 12: mod_base = OTHER; note = 2'-O-methylcytidine-3'-phosphate
  modified_base 13: mod_base = OTHER; note = 2'-O-methyluridine-3'-phosphate
  modified_base 14: mod_base = OTHER; note = 2'-deoxy-2'-fluoroadenosine-3'-phosphate
  modified_base 15: mod_base = OTHER; note = 2'-O-methyladenosine-3'-phosphate
  modified_base 16: mod_base = OTHER; note = 2'-deoxy-2'-fluoroadenosine-3'-phosphate
  modified_base 17: mod_base = OTHER; note = 2'-O-methyluridine-3'-phosphate
  modified_base 18: mod_base = OTHER; note = 2'-O-methyluridine-3'-phosphate
  modified_base 19: mod_base = OTHER; note = 2'-O-methylguanosine-3'-phosphate
  modified_base 20: mod_base = OTHER; note = 2'-O-methyluridine-3'-phosphate
  modified_base 21: mod_base = OTHER; note = 2'-O-methyladenosine-3'-phosphorothioate
  modified_base 22: mod_base = OTHER; note = 2'-O-methylcytidine-3'-phosphorothioate
  modified_base 23: mod_base = OTHER; note = 2'-O-methyluridine
tagcataatcactaaattgtact

SEQ ID NO: 12770 - RNA, 23 nt, synthetic construct
  source 1..23: mol_type = other RNA
  modified_base 1: mod_base = OTHER; note = 2'-O-methyluridine-3'-phosphorothioate 5'-(E)-Vinylphosphonate
  modified_base 2: mod_base = OTHER; note = 2'-deoxy-2'-fluoroadenosine-3'-phosphorothioate
  modified_base 3: mod_base = OTHER; note = 2'-O-methyladenosine-3'-phosphate
  modified_base 4: mod_base = OTHER; note = 2'-O-methylguanosine-3'-phosphate
  modified_base 5: mod_base = OTHER; note = 2'-O-methylcytidine-3'-phosphate
  modified_base 6: mod_base = OTHER; note = 2'-deoxy-2'-fluoroadenosine-3'-phosphate
  modified_base 7: mod_base = OTHER; note = 2'-O-methyluridine-3'-phosphate
  modified_base 8: mod_base = OTHER; note = 2'-O-methyladenosine-3'-phosphate
  modified_base 9: mod_base = OTHER; note = 2'-O-methyladenosine-3'-phosphate
  modified_base 10: mod_base = OTHER; note = 2'-O-methyluridine-3'-phosphate
  modified_base 11: mod_base = OTHER; note = 2'-O-methylcytidine-3'-phosphate
  modified_base 12: mod_base = OTHER; note = 2'-O-methyladenosine-3'-phosphate
  modified_base 13: mod_base = OTHER; note = 2'-O-methylcytidine-3'-phosphate
  modified_base 14: mod_base = OTHER; note = 2'-deoxy-2'-fluorouridine-3'-phosphate
  modified_base 15: mod_base = OTHER; note = 2'-O-methyladenosine-3'-phosphate
  modified_base 16: mod_base = OTHER; note = 2'-deoxy-2'-fluoroadenosine-3'-phosphate
  modified_base 17: mod_base = OTHER; note = 2'-O-methyladenosine-3'-phosphate
  modified_base 18: mod_base = OTHER; note = 2'-O-methyluridine-3'-phosphate
  modified_base 19: mod_base = OTHER; note = 2'-O-methyluridine-3'-phosphate
  modified_base 20: mod_base = OTHER; note = 2'-O-methylguanosine-3'-phosphate
  modified_base 21: mod_base = OTHER; note = 2'-O-methyluridine-3'-phosphorothioate
  modified_base 22: mod_base = OTHER; note = 2'-O-methyladenosine-3'-phosphorothioate
  modified_base 23: mod_base = OTHER; note = 2'-O-methylcytidine
taagcataatcactaaattgtac

SEQ ID NO: 12771 - RNA, 23 nt, synthetic construct
  source 1..23: mol_type = other RNA
  modified_base 1: mod_base = OTHER; note = 2'-O-methyluridine-3'-phosphorothioate 5'-(E)-Vinylphosphonate
  modified_base 2: mod_base = OTHER; note = 2'-deoxy-2'-fluorouridine-3'-phosphorothioate
  modified_base 3: mod_base = OTHER; note = 2'-O-methylguanosine-3'-phosphate
  modified_base 4: mod_base = OTHER; note = 2'-O-methyladenosine-3'-phosphate
  modified_base 5: mod_base = OTHER; note = 2'-O-methyladenosine-3'-phosphate
  modified_base 6: mod_base = OTHER; note = 2'-deoxy-2'-fluoroadenosine-3'-phosphate
  modified_base 7: mod_base = OTHER; note = 2'-O-methyluridine-3'-phosphate
  modified_base 8: mod_base = OTHER; note = 2'-O-methylguanosine-3'-phosphate
  modified_base 9: mod_base = OTHER; note = 2'-O-methyladenosine-3'-phosphate
  modified_base 10: mod_base = OTHER; note = 2'-O-methyladenosine-3'-phosphate
  modified_base 11: mod_base = OTHER; note = 2'-O-methylguanosine-3'-phosphate
  modified_base 12: mod_base = OTHER; note = 2'-O-methylcytidine-3'-phosphate
  modified_base 13: mod_base = OTHER; note = 2'-O-methyladenosine-3'-phosphate
  modified_base 14: mod_base = OTHER; note = 2'-deoxy-2'-fluorouridine-3'-phosphate
  modified_base 15: mod_base = OTHER; note = 2'-O-methyladenosine-3'-phosphate
  modified_base 16: mod_base = OTHER; note = 2'-deoxy-2'-fluoroadenosine-3'-phosphate
  modified_base 17: mod_base = OTHER; note = 2'-O-methyluridine-3'-phosphate
  modified_base 18: mod_base = OTHER; note = 2'-O-methylcytidine-3'-phosphate
  modified_base 19: mod_base = OTHER; note = 2'-O-methyladenosine-3'-phosphate
  modified_base 20: mod_base = OTHER; note = 2'-O-methylcytidine-3'-phosphate
  modified_base 21: mod_base = OTHER; note = 2'-O-methyluridine-3'-phosphorothioate
  modified_base 22: mod_base = OTHER; note = 2'-O-methyladenosine-3'-phosphorothioate
  modified_base 23: mod_base = OTHER; note = 2'-O-methyladenosine
ttgaaatgaagcataatcactaa

SEQ ID NO: 12772 - RNA, 23 nt, synthetic construct
  source 1..23: mol_type = other RNA
  modified_base 1: mod_base = OTHER; note = 2'-O-methyluridine-3'-phosphorothioate 5'-(E)-Vinylphosphonate
  modified_base 2: mod_base = OTHER; note = 2'-deoxy-2'-fluoroguanosine-3'-phosphorothioate
  modified_base 3: mod_base = OTHER; note = 2'-O-methyluridine-3'-phosphate
  modified_base 4: mod_base = OTHER; note = 2'-O-methylguanosine-3'-phosphate
  modified_base 5: mod_base = OTHER; note = 2'-O-methyladenosine-3'-phosphate
  modified_base 6: mod_base = OTHER; note = 2'-deoxy-2'-fluoroadenosine-3'-phosphate
  modified_base 7: mod_base = OTHER; note = 2'-O-methyladenosine-3'-phosphate
  modified_base 8: mod_base = OTHER; note = 2'-O-methyluridine-3'-phosphate
  modified_base 9: mod_base = OTHER; note = 2'-O-methylguanosine-3'-phosphate
  modified_base 10: mod_base = OTHER; note = 2'-O-methyladenosine-3'-phosphate
  modified_base 11: mod_base = OTHER; note = 2'-O-methyladenosine-3'-phosphate
  modified_base 12: mod_base = OTHER; note = 2'-O-methylguanosine-3'-phosphate
  modified_base 13: mod_base = OTHER; note = 2'-O-methylcytidine-3'-phosphate
  modified_base 14: mod_base = OTHER; note = 2'-deoxy-2'-fluoroadenosine-3'-phosphate
  modified_base 15: mod_base = OTHER; note = 2'-O-methyluridine-3'-phosphate
  modified_base 16: mod_base = OTHER; note = 2'-deoxy-2'-fluoroadenosine-3'-phosphate
  modified_base 17: mod_base = OTHER; note = 2'-O-methyladenosine-3'-phosphate
  modified_base 18: mod_base = OTHER; note = 2'-O-methyluridine-3'-phosphate
  modified_base 19: mod_base = OTHER; note = 2'-O-methylcytidine-3'-phosphate
  modified_base 20: mod_base = OTHER; note = 2'-O-methyladenosine-3'-phosphate
  modified_base 21: mod_base = OTHER; note = 2'-O-methylcytidine-3'-phosphorothioate
  modified_base 22: mod_base = OTHER; note = 2'-O-methyluridine-3'-phosphorothioate
  modified_base 23: mod_base = OTHER; note = 2'-O-methyladenosine
tgtgaaatgaagcataatcacta

SEQ ID NO: 12773 - RNA, 23 nt, synthetic construct
  source 1..23: mol_type = other RNA
  modified_base 1: mod_base = OTHER; note = 2'-O-methyluridine-3'-phosphorothioate 5'-(E)-Vinylphosphonate
  modified_base 2: mod_base = OTHER; note = 2'-deoxy-2'-fluoroadenosine-3'-phosphorothioate
  modified_base 3: mod_base = OTHER; note = 2'-O-methylguanosine-3'-phosphate
  modified_base 4: mod_base = OTHER; note = 2'-O-methyluridine-3'-phosphate
  modified_base 5: mod_base = OTHER; note = 2'-O-methylguanosine-3'-phosphate
  modified_base 6: mod_base = OTHER; note = 2'-deoxy-2'-fluoroadenosine-3'-phosphate
  modified_base 7: mod_base = OTHER; note = 2'-O-methyladenosine-3'-phosphate
  modified_base 8: mod_base = OTHER; note = 2'-O-methyladenosine-3'-phosphate
  modified_base 9: mod_base = OTHER; note = 2'-O-methyluridine-3'-phosphate
  modified_base 10: mod_base = OTHER; note = 2'-O-methylguanosine-3'-phosphate
  modified_base 11: mod_base = OTHER; note = 2'-O-methyladenosine-3'-phosphate
  modified_base 12: mod_base = OTHER; note = 2'-O-methyladenosine-3'-phosphate
  modified_base 13: mod_base = OTHER; note = 2'-O-methylguanosine-3'-phosphate
  modified_base 14: mod_base = OTHER; note = 2'-deoxy-2'-fluorocytidine-3'-phosphate
  modified_base 15: mod_base = OTHER; note = 2'-O-methyladenosine-3'-phosphate
  modified_base 16: mod_base = OTHER; note = 2'-deoxy-2'-fluorouridine-3'-phosphate
  modified_base 17: mod_base = OTHER; note = 2'-O-methyladenosine-3'-phosphate
  modified_base 18: mod_base = OTHER; note = 2'-O-methyladenosine-3'-phosphate
  modified_base 19: mod_base = OTHER; note = 2'-O-methyluridine-3'-phosphate
  modified_base 20: mod_base = OTHER; note = 2'-O-methylcytidine-3'-phosphate
  modified_base 21: mod_base = OTHER; note = 2'-O-methyladenosine-3'-phosphorothioate
  modified_base 22: mod_base = OTHER; note = 2'-O-methylcytidine-3'-phosphorothioate
  modified_base 23: mod_base = OTHER; note = 2'-O-methyluridine
tagtgaaatgaagcataatcact

SEQ ID NO: 12774 - RNA, 23 nt, synthetic construct
  source 1..23: mol_type = other RNA
  modified_base 1: mod_base = OTHER; note = 2'-O-methyluridine-3'-phosphorothioate 5'-(E)-Vinylphosphonate
  modified_base 2: mod_base = OTHER; note = 2'-deoxy-2'-fluorouridine-3'-phosphorothioate
  modified_base 3: mod_base = OTHER; note = 2'-O-methyladenosine-3'-phosphate
  modified_base 4: mod_base = OTHER; note = 2'-O-methylguanosine-3'-phosphate
  modified_base 5: mod_base = OTHER; note = 2'-O-methyluridine-3'-phosphate
  modified_base 6: mod_base = OTHER; note = 2'-deoxy-2'-fluoroguanosine-3'-phosphate
  modified_base 7: mod_base = OTHER; note = 2'-O-methyladenosine-3'-phosphate
  modified_base 8: mod_base = OTHER; note = 2'-O-methyladenosine-3'-phosphate
  modified_base 9: mod_base = OTHER; note = 2'-O-methyladenosine-3'-phosphate
  modified_base 10: mod_base = OTHER; note = 2'-O-methyluridine-3'-phosphate
  modified_base 11: mod_base = OTHER; note = 2'-O-methylguanosine-3'-phosphate
  modified_base 12: mod_base = OTHER; note = 2'-O-methyladenosine-3'-phosphate
  modified_base 13: mod_base = OTHER; note = 2'-O-methyladenosine-3'-phosphate
  modified_base 14: mod_base = OTHER; note = 2'-deoxy-2'-fluoroguanosine-3'-phosphate
  modified_base 15: mod_base = OTHER; note = 2'-O-methylcytidine-3'-phosphate
  modified_base 16: mod_base = OTHER; note = 2'-deoxy-2'-fluoroadenosine-3'-phosphate
  modified_base 17: mod_base = OTHER; note = 2'-O-methyluridine-3'-phosphate
  modified_base 18: mod_base = OTHER; note = 2'-O-methyladenosine-3'-phosphate
  modified_base 19: mod_base = OTHER; note = 2'-O-methyladenosine-3'-phosphate
  modified_base 20: mod_base = OTHER; note = 2'-O-methyluridine-3'-phosphate
  modified_base 21: mod_base = OTHER; note = 2'-O-methylcytidine-3'-phosphorothioate
  modified_base 22: mod_base = OTHER; note = 2'-O-methyladenosine-3'-phosphorothioate
  modified_base 23: mod_base = OTHER; note = 2'-O-methylcytidine
ttagtgaaatgaagcataatcac

SEQ ID NO: 12775 - RNA, 23 nt, synthetic construct
  source 1..23: mol_type = other RNA
  modified_base 1: mod_base = OTHER; note = 2'-O-methyluridine-3'-phosphorothioate 5'-(E)-Vinylphosphonate
  modified_base 2: mod_base = OTHER; note = 2'-deoxy-2'-fluorocytidine-3'-phosphorothioate
  modified_base 3: mod_base = OTHER; note = 2'-O-methyladenosine-3'-phosphate
  modified_base 4: mod_base = OTHER; note = 2'-O-methyluridine-3'-phosphate
  modified_base 5: mod_base = OTHER; note = 2'-O-methyladenosine-3'-phosphate
  modified_base 6: mod_base = OTHER; note = 2'-deoxy-2'-fluoroguanosine-3'-phosphate
  modified_base 7: mod_base = OTHER; note = 2'-O-methyluridine-3'-phosphate
  modified_base 8: mod_base = OTHER; note = 2'-O-methylguanosine-3'-phosphate
  modified_base 9: mod_base = OTHER; note = 2'-O-methyladenosine-3'-phosphate
  modified_base 10: mod_base = OTHER; note = 2'-O-methyladenosine-3'-phosphate
  modified_base 11: mod_base = OTHER; note = 2'-O-methyladenosine-3'-phosphate
  modified_base 12: mod_base = OTHER; note = 2'-O-methyluridine-3'-phosphate
  modified_base 13: mod_base = OTHER; note = 2'-O-methylguanosine-3'-phosphate
  modified_base 14: mod_base = OTHER; note = 2'-deoxy-2'-fluoroadenosine-3'-phosphate
  modified_base 15: mod_base = OTHER; note = 2'-O-methyladenosine-3'-phosphate
  modified_base 16: mod_base = OTHER; note = 2'-deoxy-2'-fluoroguanosine-3'-phosphate
  modified_base 17: mod_base = OTHER; note = 2'-O-methylcytidine-3'-phosphate
  modified_base 18: mod_base = OTHER; note = 2'-O-methyladenosine-3'-phosphate
  modified_base 19: mod_base = OTHER; note = 2'-O-methyluridine-3'-phosphate
  modified_base 20: mod_base = OTHER; note = 2'-O-methyladenosine-3'-phosphate
  modified_base 21: mod_base = OTHER; note = 2'-O-methyladenosine-3'-phosphorothioate
  modified_base 22: mod_base = OTHER; note = 2'-O-methyluridine-3'-phosphorothioate
  modified_base 23: mod_base = OTHER; note = 2'-O-methylcytidine
tcatagtgaaatgaagcataatc

SEQ ID NO: 12776 - RNA, 23 nt, synthetic construct
  source 1..23: mol_type = other RNA
  modified_base 1: mod_base = OTHER; note = 2'-O-methyluridine-3'-phosphorothioate 5'-(E)-Vinylphosphonate
  modified_base 2: mod_base = OTHER; note = 2'-deoxy-2'-fluorocytidine-3'-phosphorothioate
  modified_base 3: mod_base = OTHER; note = 2'-O-methylcytidine-3'-phosphate
  modified_base 4: mod_base = OTHER; note = 2'-O-methyladenosine-3'-phosphate
  modified_base 5: mod_base = OTHER; note = 2'-O-methyluridine-3'-phosphate
  modified_base 6: mod_base = OTHER; note = 2'-deoxy-2'-fluoroadenosine-3'-phosphate
  modified_base 7: mod_base = OTHER; note = 2'-O-methylguanosine-3'-phosphate
  modified_base 8: mod_base = OTHER; note = 2'-O-methyluridine-3'-phosphate
  modified_base 9: mod_base = OTHER; note = 2'-O-methylguanosine-3'-phosphate
  modified_base 10: mod_base = OTHER; note = 2'-O-methyladenosine-3'-phosphate
  modified_base 11: mod_base = OTHER; note = 2'-O-methyladenosine-3'-phosphate
  modified_base 12: mod_base = OTHER; note = 2'-O-methyladenosine-3'-phosphate
  modified_base 13: mod_base = OTHER; note = 2'-O-methyluridine-3'-phosphate
  modified_base 14: mod_base = OTHER; note = 2'-deoxy-2'-fluoroguanosine-3'-phosphate
  modified_base 15: mod_base = OTHER; note = 2'-O-methyladenosine-3'-phosphate
  modified_base 16: mod_base = OTHER; note = 2'-deoxy-2'-fluoroadenosine-3'-phosphate
  modified_base 17: mod_base = OTHER; note = 2'-O-methylguanosine-3'-phosphate
  modified_base 18: mod_base = OTHER; note = 2'-O-methylcytidine-3'-phosphate
  modified_base 19: mod_base = OTHER; note = 2'-O-methyladenosine-3'-phosphate
  modified_base 20: mod_base = OTHER; note = 2'-O-methyluridine-3'-phosphate
  modified_base 21: mod_base = OTHER; note = 2'-O-methyladenosine-3'-phosphorothioate
  modified_base 22: mod_base = OTHER; note = 2'-O-methyladenosine-3'-phosphorothioate
  modified_base 23: mod_base = OTHER; note = 2'-O-methyluridine
tccatagtgaaatgaagcataat

SEQ ID NO: 12777 - RNA, 23 nt, synthetic construct
  source 1..23: mol_type = other RNA
  modified_base 1: mod_base = OTHER; note = 2'-O-methyluridine-3'-phosphorothioate 5'-(E)-Vinylphosphonate
  modified_base 2: mod_base = OTHER; note = 2'-deoxy-2'-fluorouridine-3'-phosphorothioate
  modified_base 3: mod_base = OTHER; note = 2'-O-methylcytidine-3'-phosphate
  modified_base 4: mod_base = OTHER; note = 2'-O-methylcytidine-3'-phosphate
  modified_base 5: mod_base = OTHER; note = 2'-O-methyladenosine-3'-phosphate
  modified_base 6: mod_base = OTHER; note = 2'-deoxy-2'-fluorouridine-3'-phosphate
  modified_base 7: mod_base = OTHER; note = 2'-O-methyladenosine-3'-phosphate
  modified_base 8: mod_base = OTHER; note = 2'-O-methylguanosine-3'-phosphate
  modified_base 9: mod_base = OTHER; note = 2'-O-methyluridine-3'-phosphate
  modified_base 10: mod_base = OTHER; note = 2'-O-methylguanosine-3'-phosphate
  modified_base 11: mod_base = OTHER; note = 2'-O-methyladenosine-3'-phosphate
  modified_base 12: mod_base = OTHER; note = 2'-O-methyladenosine-3'-phosphate
  modified_base 13: mod_base = OTHER; note = 2'-O-methyladenosine-3'-phosphate
  modified_base 14: mod_base = OTHER; note = 2'-deoxy-2'-fluorouridine-3'-phosphate
  modified_base 15: mod_base = OTHER; note = 2'-O-methylguanosine-3'-phosphate
  modified_base 16: mod_base = OTHER; note = 2'-deoxy-2'-fluoroadenosine-3'-phosphate
  modified_base 17: mod_base = OTHER; note = 2'-O-methyladenosine-3'-phosphate
  modified_base 18: mod_base = OTHER; note = 2'-O-methylguanosine-3'-phosphate
  modified_base 19: mod_base = OTHER; note = 2'-O-methylcytidine-3'-phosphate
  modified_base 20: mod_base = OTHER; note = 2'-O-methyladenosine-3'-phosphate
  modified_base 21: mod_base = OTHER; note = 2'-O-methyluridine-3'-phosphorothioate
  modified_base 22: mod_base = OTHER; note = 2'-O-methyladenosine-3'-phosphorothioate
  modified_base 23: mod_base = OTHER; note = 2'-O-methyladenosine
ttccatagtgaaatgaagcataa

SEQ ID NO: 12778 - RNA, 23 nt, synthetic construct
  source 1..23: mol_type = other RNA
  modified_base 1: mod_base = OTHER; note = 2'-O-methyluridine-3'-phosphorothioate 5'-(E)-Vinylphosphonate
  modified_base 2: mod_base = OTHER; note = 2'-deoxy-2'-fluorouridine-3'-phosphorothioate
  modified_base 3: mod_base = OTHER; note = 2'-O-methyluridine-3'-phosphate
  modified_base 4: mod_base = OTHER; note = 2'-O-methylcytidine-3'-phosphate
  modified_base 5: mod_base = OTHER; note = 2'-O-methylcytidine-3'-phosphate
  modified_base 6: mod_base = OTHER; note = 2'-deoxy-2'-fluoroadenosine-3'-phosphate
  modified_base 7: mod_base = OTHER; note = 2'-O-methyluridine-3'-phosphate
  modified_base 8: mod_base = OTHER; note = 2'-O-methyladenosine-3'-phosphate
  modified_base 9: mod_base = OTHER; note = 2'-O-methylguanosine-3'-phosphate
  modified_base 10: mod_base = OTHER; note = 2'-O-methyluridine-3'-phosphate
  modified_base 11: mod_base = OTHER; note = 2'-O-methylguanosine-3'-phosphate
  modified_base 12: mod_base = OTHER; note = 2'-O-methyladenosine-3'-phosphate
  modified_base 13: mod_base = OTHER; note = 2'-O-methyladenosine-3'-phosphate
  modified_base 14: mod_base = OTHER; note = 2'-deoxy-2'-fluoroadenosine-3'-phosphate
  modified_base 15: mod_base = OTHER; note = 2'-O-methyluridine-3'-phosphate
  modified_base 16: mod_base = OTHER; note = 2'-deoxy-2'-fluoroguanosine-3'-phosphate
  modified_base 17: mod_base = OTHER; note = 2'-O-methyladenosine-3'-phosphate
  modified_base 18: mod_base = OTHER; note = 2'-O-methyladenosine-3'-phosphate
  modified_base 19: mod_base = OTHER; note = 2'-O-methylguanosine-3'-phosphate
  modified_base 20: mod_base = OTHER; note = 2'-O-methylcytidine-3'-phosphate
  modified_base 21: mod_base = OTHER; note = 2'-O-methyladenosine-3'-phosphorothioate
  modified_base 22: mod_base = OTHER; note = 2'-O-methyluridine-3'-phosphorothioate
  modified_base 23: mod_base = OTHER; note = 2'-O-methyladenosine
tttccatagtgaaatgaagcata

SEQ ID NO: 12779 - RNA, 23 nt, synthetic construct
  source 1..23: mol_type = other RNA
  modified_base 1: mod_base = OTHER; note = 2'-O-methyluridine-3'-phosphorothioate 5'-(E)-Vinylphosphonate
  modified_base 2: mod_base = OTHER; note = 2'-deoxy-2'-fluorouridine-3'-phosphorothioate
  modified_base 3: mod_base = OTHER; note = 2'-O-methyluridine-3'-phosphate
  modified_base 4: mod_base = OTHER; note = 2'-O-methyluridine-3'-phosphate
  modified_base 5: mod_base = OTHER; note = 2'-O-methylcytidine-3'-phosphate
  modified_base 6: mod_base = OTHER; note = 2'-deoxy-2'-fluorocytidine-3'-phosphate
  modified_base 7: mod_base = OTHER; note = 2'-O-methyladenosine-3'-phosphate
  modified_base 8: mod_base = OTHER; note = 2'-O-methyluridine-3'-phosphate
  modified_base 9: mod_base = OTHER; note = 2'-O-methyladenosine-3'-phosphate
  modified_base 10: mod_base = OTHER; note = 2'-O-methylguanosine-3'-phosphate
  modified_base 11: mod_base = OTHER; note = 2'-O-methyluridine-3'-phosphate
  modified_base 12: mod_base = OTHER; note = 2'-O-methylguanosine-3'-phosphate
  modified_base 13: mod_base = OTHER; note = 2'-O-methyladenosine-3'-phosphate
  modified_base 14: mod_base = OTHER; note = 2'-deoxy-2'-fluoroadenosine-3'-phosphate
  modified_base 15: mod_base = OTHER; note = 2'-O-methyladenosine-3'-phosphate
  modified_base 16: mod_base = OTHER; note = 2'-deoxy-2'-fluorouridine-3'-phosphate
  modified_base 17: mod_base = OTHER; note = 2'-O-methylguanosine-3'-phosphate
  modified_base 18: mod_base = OTHER; note = 2'-O-methyladenosine-3'-phosphate
  modified_base 19: mod_base = OTHER; note = 2'-O-methyladenosine-3'-phosphate
  modified_base 20: mod_base = OTHER; note = 2'-O-methylguanosine-3'-phosphate
  modified_base 21: mod_base = OTHER; note = 2'-O-methylcytidine-3'-phosphorothioate
  modified_base 22: mod_base = OTHER; note = 2'-O-methyladenosine-3'-phosphorothioate
  modified_base 23: mod_base = OTHER; note = 2'-O-methyluridine
ttttccatagtgaaatgaagcat

SEQ ID NO: 12780 - RNA, 23 nt, synthetic construct
  source 1..23: mol_type = other RNA
  modified_base 1: mod_base = OTHER; note = 2'-O-methyluridine-3'-phosphorothioate 5'-(E)-Vinylphosphonate
  modified_base 2: mod_base = OTHER; note = 2'-deoxy-2'-fluoroadenosine-3'-phosphorothioate
  modified_base 3: mod_base = OTHER; note = 2'-O-methyluridine-3'-phosphate
  modified_base 4: mod_base = OTHER; note = 2'-O-methyluridine-3'-phosphate
  modified_base 5: mod_base = OTHER; note = 2'-O-methyluridine-3'-phosphate
  modified_base 6: mod_base = OTHER; note = 2'-deoxy-2'-fluorocytidine-3'-phosphate
  modified_base 7: mod_base = OTHER; note = 2'-O-methylcytidine-3'-phosphate
  modified_base 8: mod_base = OTHER; note = 2'-O-methyladenosine-3'-phosphate
  modified_base 9: mod_base = OTHER; note = 2'-O-methyluridine-3'-phosphate
  modified_base 10: mod_base = OTHER; note = 2'-O-methyladenosine-3'-phosphate
  modified_base 11: mod_base = OTHER; note = 2'-O-methylguanosine-3'-phosphate
  modified_base 12: mod_base = OTHER; note = 2'-O-methyluridine-3'-phosphate
  modified_base 13: mod_base = OTHER; note = 2'-O-methylguanosine-3'-phosphate
  modified_base 14: mod_base = OTHER; note = 2'-deoxy-2'-fluoroadenosine-3'-phosphate
  modified_base 15: mod_base = OTHER; note = 2'-O-methyladenosine-3'-phosphate
  modified_base 16: mod_base = OTHER; note = 2'-deoxy-2'-fluoroadenosine-3'-phosphate
  modified_base 17: mod_base = OTHER; note = 2'-O-methyluridine-3'-phosphate
  modified_base 18: mod_base = OTHER; note = 2'-O-methylguanosine-3'-phosphate
  modified_base 19: mod_base = OTHER; note = 2'-O-methyladenosine-3'-phosphate
  modified_base 20: mod_base = OTHER; note = 2'-O-methyladenosine-3'-phosphate
  modified_base 21: mod_base = OTHER; note = 2'-O-methylguanosine-3'-phosphorothioate
  modified_base 22: mod_base = OTHER; note = 2'-O-methylcytidine-3'-phosphorothioate
  modified_base 23: mod_base = OTHER; note = 2'-O-methyladenosine
tatttccatagtgaaatgaagca

SEQ ID NO: 12781 - RNA, 23 nt, synthetic construct
  source 1..23: mol_type = other RNA
  modified_base 1: mod_base = OTHER; note = 2'-O-methyluridine-3'-phosphorothioate 5'-(E)-Vinylphosphonate
  modified_base 2: mod_base = OTHER; note = 2'-deoxy-2'-fluorouridine-3'-phosphorothioate
  modified_base 3: mod_base = OTHER; note = 2'-O-methyladenosine-3'-phosphate
  modified_base 4: mod_base = OTHER; note = 2'-O-methyluridine-3'-phosphate
  modified_base 5: mod_base = OTHER; note = 2'-O-methyluridine-3'-phosphate
  modified_base 6: mod_base = OTHER; note = 2'-deoxy-2'-fluorouridine-3'-phosphate
  modified_base 7: mod_base = OTHER; note = 2'-O-methylcytidine-3'-phosphate
  modified_base 8: mod_base = OTHER; note = 2'-O-methylcytidine-3'-phosphate
  modified_base 9: mod_base = OTHER; note = 2'-O-methyladenosine-3'-phosphate
  modified_base 10: mod_base = OTHER; note = 2'-O-methyluridine-3'-phosphate
  modified_base 11: mod_base = OTHER; note = 2'-O-methyladenosine-3'-phosphate
  modified_base 12: mod_base = OTHER; note = 2'-O-methylguanosine-3'-phosphate
  modified_base 13: mod_base = OTHER; note = 2'-O-methyluridine-3'-phosphate
  modified_base 14: mod_base = OTHER; note = 2'-deoxy-2'-fluoroguanosine-3'-phosphate
  modified_base 15: mod_base = OTHER; note = 2'-O-methyladenosine-3'-phosphate
  modified_base 16: mod_base = OTHER; note = 2'-deoxy-2'-fluoroadenosine-3'-phosphate
  modified_base 17: mod_base = OTHER; note = 2'-O-methyladenosine-3'-phosphate
  modified_base 18: mod_base = OTHER; note = 2'-O-methyluridine-3'-phosphate
  modified_base 19: mod_base = OTHER; note = 2'-O-methylguanosine-3'-phosphate
  modified_base 20: mod_base = OTHER; note = 2'-O-methyladenosine-3'-phosphate
  modified_base 21: mod_base = OTHER; note = 2'-O-methyladenosine-3'-phosphorothioate
  modified_base 22: mod_base = OTHER; note = 2'-O-methylguanosine-3'-phosphorothioate
  modified_base 23: mod_base = OTHER; note = 2'-O-methylcytidine
ttatttccatagtgaaatgaagc

SEQ ID NO: 12782 - RNA, 23 nt, synthetic construct
  source 1..23: mol_type = other RNA
  modified_base 1: mod_base = OTHER; note = 2'-O-methyluridine-3'-phosphorothioate 5'-(E)-Vinylphosphonate
  modified_base 2: mod_base = OTHER; note = 2'-deoxy-2'-fluoroadenosine-3'-phosphorothioate
  modified_base 3: mod_base = OTHER; note = 2'-O-methyluridine-3'-phosphate
  modified_base 4: mod_base = OTHER; note = 2'-O-methyladenosine-3'-phosphate
  modified_base 5: mod_base = OTHER; note = 2'-O-methyluridine-3'-phosphate
  modified_base 6: mod_base = OTHER; note = 2'-deoxy-2'-fluorouridine-3'-phosphate
  modified_base 7: mod_base = OTHER; note = 2'-O-methyluridine-3'-phosphate
  modified_base 8: mod_base = OTHER; note = 2'-O-methylcytidine-3'-phosphate
  modified_base 9: mod_base = OTHER; note = 2'-O-methylcytidine-3'-phosphate
  modified_base 10: mod_base = OTHER; note = 2'-O-methyladenosine-3'-phosphate
  modified_base 11: mod_base = OTHER; note = 2'-O-methyluridine-3'-phosphate
  modified_base 12: mod_base = OTHER; note = 2'-O-methyladenosine-3'-phosphate
  modified_base 13: mod_base = OTHER; note = 2'-O-methylguanosine-3'-phosphate
  modified_base 14: mod_base = OTHER; note = 2'-deoxy-2'-fluorouridine-3'-phosphate
  modified_base 15: mod_base = OTHER; note = 2'-O-methylguanosine-3'-phosphate
  modified_base 16: mod_base = OTHER; note = 2'-deoxy-2'-fluoroadenosine-3'-phosphate
  modified_base 17: mod_base = OTHER; note = 2'-O-methyladenosine-3'-phosphate
  modified_base 18: mod_base = OTHER; note = 2'-O-methyladenosine-3'-phosphate
  modified_base 19: mod_base = OTHER; note = 2'-O-methyluridine-3'-phosphate
  modified_base 20: mod_base = OTHER; note = 2'-O-methylguanosine-3'-phosphate
  modified_base 21: mod_base = OTHER; note = 2'-O-methyladenosine-3'-phosphorothioate
  modified_base 22: mod_base = OTHER; note = 2'-O-methyladenosine-3'-phosphorothioate
  modified_base 23: mod_base = OTHER; note = 2'-O-methylguanosine
tatatttccatagtgaaatgaag

SEQ ID NO: 12783 - RNA, 23 nt, synthetic construct
  source 1..23: mol_type = other RNA
  modified_base 1: mod_base = OTHER; note = 2'-O-methyluridine-3'-phosphorothioate 5'-(E)-Vinylphosphonate
  modified_base 2: mod_base = OTHER; note = 2'-deoxy-2'-fluoroadenosine-3'-phosphorothioate
  modified_base 3: mod_base = OTHER; note = 2'-O-methyladenosine-3'-phosphate
  modified_base 4: mod_base = OTHER; note = 2'-O-methylcytidine-3'-phosphate
  modified_base 5: mod_base = OTHER; note = 2'-O-methyladenosine-3'-phosphate
  modified_base 6: mod_base = OTHER; note = 2'-deoxy-2'-fluorouridine-3'-phosphate
  modified_base 7: mod_base = OTHER; note = 2'-O-methyladenosine-3'-phosphate
  modified_base 8: mod_base = OTHER; note = 2'-O-methyluridine-3'-phosphate
  modified_base 9: mod_base = OTHER; note = 2'-O-methyluridine-3'-phosphate
  modified_base 10: mod_base = OTHER; note = 2'-O-methyluridine-3'-phosphate
  modified_base 11: mod_base = OTHER; note = 2'-O-methylcytidine-3'-phosphate
  modified_base 12: mod_base = OTHER; note = 2'-O-methylcytidine-3'-phosphate
  modified_base 13: mod_base = OTHER; note = 2'-O-methyladenosine-3'-phosphate
  modified_base 14: mod_base = OTHER; note = 2'-deoxy-2'-fluorouridine-3'-phosphate
  modified_base 15: mod_base = OTHER; note = 2'-O-methyladenosine-3'-phosphate
  modified_base 16: mod_base = OTHER; note = 2'-deoxy-2'-fluoroguanosine-3'-phosphate
  modified_base 17: mod_base = OTHER; note = 2'-O-methyluridine-3'-phosphate
  modified_base 18: mod_base = OTHER; note = 2'-O-methylguanosine-3'-phosphate
  modified_base 19: mod_base = OTHER; note = 2'-O-methyladenosine-3'-phosphate
  modified_base 20: mod_base = OTHER; note = 2'-O-methyladenosine-3'-phosphate
  modified_base 21: mod_base = OTHER; note = 2'-O-methyladenosine-3'-phosphorothioate
  modified_base 22: mod_base = OTHER; note = 2'-O-methyluridine-3'-phosphorothioate
  modified_base 23: mod_base = OTHER; note = 2'-O-methylguanosine
taacatatttccatagtgaaatg

SEQ ID NO: 12784 - RNA, 23 nt, synthetic construct
  source 1..23: mol_type = other RNA
  modified_base 1: mod_base = OTHER; note = 2'-O-methyluridine-3'-phosphorothioate 5'-(E)-Vinylphosphonate
  modified_base 2: mod_base = OTHER; note = 2'-deoxy-2'-fluorocytidine-3'-phosphorothioate
  modified_base 3: mod_base = OTHER; note = 2'-O-methyladenosine-3'-phosphate
  modified_base 4: mod_base = OTHER; note = 2'-O-methylguanosine-3'-phosphate
  modified_base 5: mod_base = OTHER; note = 2'-O-methyluridine-3'-phosphate
  modified_base 6: mod_base = OTHER; note = 2'-deoxy-2'-fluoroadenosine-3'-phosphate
  modified_base 7: mod_base = OTHER; note = 2'-O-methyladenosine-3'-phosphate
  modified_base 8: mod_base = OTHER; note = 2'-O-methylcytidine-3'-phosphate
  modified_base 9: mod_base = OTHER; note = 2'-O-methyladenosine-3'-phosphate
  modified_base 10: mod_base = OTHER; note = 2'-O-methyluridine-3'-phosphate
  modified_base 11: mod_base = OTHER; note = 2'-O-methyladenosine-3'-phosphate
  modified_base 12: mod_base = OTHER; note = 2'-O-methyluridine-3'-phosphate
  modified_base 13: mod_base = OTHER; note = 2'-O-methyluridine-3'-phosphate
  modified_base 14: mod_base = OTHER; note = 2'-deoxy-2'-fluorouridine-3'-phosphate
  modified_base 15: mod_base = OTHER; note = 2'-O-methylcytidine-3'-phosphate
  modified_base 16: mod_base = OTHER; note = 2'-deoxy-2'-fluorocytidine-3'-phosphate
  modified_base 17: mod_base = OTHER; note = 2'-O-methyladenosine-3'-phosphate
  modified_base 18: mod_base = OTHER; note = 2'-O-methyluridine-3'-phosphate
  modified_base 19: mod_base = OTHER; note = 2'-O-methyladenosine-3'-phosphate
  modified_base 20: mod_base = OTHER; note = 2'-O-methylguanosine-3'-phosphate
  modified_base 21: mod_base = OTHER; note = 2'-O-methyluridine-3'-phosphorothioate
  modified_base 22: mod_base = OTHER; note = 2'-O-methylguanosine-3'-phosphorothioate
  modified_base 23: mod_base = OTHER; note = 2'-O-methyladenosine
tcagtaacatatttccatagtga

SEQ ID NO: 12785 - RNA, 23 nt, synthetic construct
  source 1..23: mol_type = other RNA
  modified_base 1: mod_base = OTHER; note = 2'-O-methyluridine-3'-phosphorothioate 5'-(E)-Vinylphosphonate
  modified_base 2: mod_base = OTHER; note = 2'-deoxy-2'-fluorouridine-3'-phosphorothioate
  modified_base 3: mod_base = OTHER; note = 2'-O-methylcytidine-3'-phosphate
  modified_base 4: mod_base = OTHER; note = 2'-O-methyladenosine-3'-phosphate
  modified_base 5: mod_base = OTHER; note = 2'-O-methylguanosine-3'-phosphate
  modified_base 6: mod_base = OTHER; note = 2'-deoxy-2'-fluorouridine-3'-phosphate
  modified_base 7: mod_base = OTHER; note = 2'-O-methyladenosine-3'-phosphate
  modified_base 8: mod_base = OTHER; note = 2'-O-methyladenosine-3'-phosphate
  modified_base 9: mod_base = OTHER; note = 2'-O-methylcytidine-3'-phosphate
  modified_base 10: mod_base = OTHER; note = 2'-O-methyladenosine-3'-phosphate
  modified_base 11: mod_base = OTHER; note = 2'-O-methyluridine-3'-phosphate
  modified_base 12: mod_base = OTHER; note = 2'-O-methyladenosine-3'-phosphate
  modified_base 13: mod_base = OTHER; note = 2'-O-methyluridine-3'-phosphate
  modified_base 14: mod_base = OTHER; note = 2'-deoxy-2'-fluorouridine-3'-phosphate
  modified_base 15: mod_base = OTHER; note = 2'-O-methyluridine-3'-phosphate
  modified_base 16: mod_base = OTHER; note = 2'-deoxy-2'-fluorocytidine-3'-phosphate
  modified_base 17: mod_base = OTHER; note = 2'-O-methylcytidine-3'-phosphate
  modified_base 18: mod_base = OTHER; note = 2'-O-methyladenosine-3'-phosphate
  modified_base 19: mod_base = OTHER; note = 2'-O-methyluridine-3'-phosphate
  modified_base 20: mod_base = OTHER; note = 2'-O-methyladenosine-3'-phosphate
  modified_base 21: mod_base = OTHER; note = 2'-O-methylguanosine-3'-phosphorothioate
  modified_base 22: mod_base = OTHER; note = 2'-O-methyluridine-3'-phosphorothioate
  modified_base 23: mod_base = OTHER; note = 2'-O-methylguanosine
ttcagtaacatatttccatagtg

SEQ ID NO: 12786 - RNA, 23 nt, synthetic construct
  source 1..23: mol_type = other RNA
  modified_base 1: mod_base = OTHER; note = 2'-O-methyluridine-3'-phosphorothioate 5'-(E)-Vinylphosphonate
  modified_base 2: mod_base = OTHER; note = 2'-deoxy-2'-fluorouridine-3'-phosphorothioate
  modified_base 3: mod_base = OTHER; note = 2'-O-methyluridine-3'-phosphate
  modified_base 4: mod_base = OTHER; note = 2'-O-methylcytidine-3'-phosphate
  modified_base 5: mod_base = OTHER; note = 2'-O-methyladenosine-3'-phosphate
  modified_base 6: mod_base = OTHER; note = 2'-deoxy-2'-fluoroguanosine-3'-phosphate
  modified_base 7: mod_base = OTHER; note = 2'-O-methyluridine-3'-phosphate
  modified_base 8: mod_base = OTHER; note = 2'-O-methyladenosine-3'-phosphate
  modified_base 9: mod_base = OTHER; note = 2'-O-methyladenosine-3'-phosphate
  modified_base 10: mod_base = OTHER; note = 2'-O-methylcytidine-3'-phosphate
  modified_base 11: mod_base = OTHER; note = 2'-O-methyladenosine-3'-phosphate
  modified_base 12: mod_base = OTHER; note = 2'-O-methyluridine-3'-phosphate
  modified_base 13: mod_base = OTHER; note = 2'-O-methyladenosine-3'-phosphate
  modified_base 14: mod_base = OTHER; note = 2'-deoxy-2'-fluorouridine-3'-phosphate
  modified_base 15: mod_base = OTHER; note = 2'-O-methyluridine-3'-phosphate
  modified_base 16: mod_base = OTHER; note = 2'-deoxy-2'-fluorouridine-3'-phosphate
  modified_base 17: mod_base = OTHER; note = 2'-O-methylcytidine-3'-phosphate
  modified_base 18: mod_base = OTHER; note = 2'-O-methylcytidine-3'-phosphate
  modified_base 19: mod_base = OTHER; note = 2'-O-methyladenosine-3'-phosphate
  modified_base 20: mod_base = OTHER; note = 2'-O-methyluridine-3'-phosphate
  modified_base 21: mod_base = OTHER; note = 2'-O-methyladenosine-3'-phosphorothioate
  modified_base 22: mod_base = OTHER; note = 2'-O-methylguanosine-3'-phosphorothioate
  modified_base 23: mod_base = OTHER; note = 2'-O-methyluridine
tttcagtaacatatttccatagt

SEQ ID NO: 12787 - RNA, 23 nt, synthetic construct
  source 1..23: mol_type = other RNA
  modified_base 1: mod_base = OTHER; note = 2'-O-methyluridine-3'-phosphorothioate 5'-(E)-Vinylphosphonate
  modified_base 2: mod_base = OTHER; note = 2'-deoxy-2'-fluoroadenosine-3'-phosphorothioate
  modified_base 3: mod_base = OTHER; note = 2'-O-methyluridine-3'-phosphate
  modified_base 4: mod_base = OTHER; note = 2'-O-methyluridine-3'-phosphate
  modified_base 5: mod_base = OTHER; note = 2'-O-methylcytidine-3'-phosphate
  modified_base 6: mod_base = OTHER; note = 2'-deoxy-2'-fluoroadenosine-3'-phosphate
  modified_base 7: mod_base = OTHER; note = 2'-O-methylguanosine-3'-phosphate
  modified_base 8: mod_base = OTHER; note = 2'-O-methyluridine-3'-phosphate
  modified_base 9: mod_base = OTHER; note = 2'-O-methyladenosine-3'-phosphate
  modified_base 10: mod_base = OTHER; note = 2'-O-methyladenosine-3'-phosphate
  modified_base 11: mod_base = OTHER; note = 2'-O-methylcytidine-3'-phosphate
  modified_base 12: mod_base = OTHER; note = 2'-O-methyladenosine-3'-phosphate
  modified_base 13: mod_base = OTHER; note = 2'-O-methyluridine-3'-phosphate
  modified_base 14: mod_base = OTHER; note = 2'-deoxy-2'-fluoroadenosine-3'-phosphate
  modified_base 15: mod_base = OTHER; note = 2'-O-methyluridine-3'-phosphate
  modified_base 16: mod_base = OTHER; note = 2'-deoxy-2'-fluorouridine-3'-phosphate
  modified_base 17: mod_base = OTHER; note = 2'-O-methyluridine-3'-phosphate
  modified_base 18: mod_base = OTHER; note = 2'-O-methylcytidine-3'-phosphate
  modified_base 19: mod_base = OTHER; note = 2'-O-methylcytidine-3'-phosphate
  modified_base 20: mod_base = OTHER; note = 2'-O-methyladenosine-3'-phosphate
  modified_base 21: mod_base = OTHER; note = 2'-O-methyluridine-3'-phosphorothioate
  modified_base 22: mod_base = OTHER; note = 2'-O-methyladenosine-3'-phosphorothioate
  modified_base 23: mod_base = OTHER; note = 2'-O-methylguanosine
tattcagtaacatatttccatag

SEQ ID NO: 12788 - RNA, 23 nt, synthetic construct
  source 1..23: mol_type = other RNA
  modified_base 1: mod_base = OTHER; note = 2'-O-methyluridine-3'-phosphorothioate 5'-(E)-Vinylphosphonate
  modified_base 2: mod_base = OTHER; note = 2'-deoxy-2'-fluoroadenosine-3'-phosphorothioate
  modified_base 3: mod_base = OTHER; note = 2'-O-methylcytidine-3'-phosphate
  modified_base 4: mod_base = OTHER; note = 2'-O-methylguanosine-3'-phosphate
  modified_base 5: mod_base = OTHER; note = 2'-O-methylcytidine-3'-phosphate
  modified_base 6: mod_base = OTHER; note = 2'-deoxy-2'-fluoroadenosine-3'-phosphate
  modified_base 7: mod_base = OTHER; note = 2'-O-methyladenosine-3'-phosphate
  modified_base 8: mod_base = OTHER; note = 2'-O-methyladenosine-3'-phosphate
  modified_base 9: mod_base = OTHER; note = 2'-O-methylcytidine-3'-phosphate
  modified_base 10: mod_base = OTHER; note = 2'-O-methyluridine-3'-phosphate
  modified_base 11: mod_base = OTHER; note = 2'-O-methylcytidine-3'-phosphate
  modified_base 12: mod_base = OTHER; note = 2'-O-methylcytidine-3'-phosphate
  modified_base 13: mod_base = OTHER; note = 2'-O-methyladenosine-3'-phosphate
  modified_base 14: mod_base = OTHER; note = 2'-deoxy-2'-fluorouridine-3'-phosphate
  modified_base 15: mod_base = OTHER; note = 2'-O-methyladenosine-3'-phosphate
  modified_base 16: mod_base = OTHER; note = 2'-deoxy-2'-fluoroguanosine-3'-phosphate
  modified_base 17: mod_base = OTHER; note = 2'-O-methylcytidine-3'-phosphate
  modified_base 18: mod_base = OTHER; note = 2'-O-methyluridine-3'-phosphate
  modified_base 19: mod_base = OTHER; note = 2'-O-methylguanosine-3'-phosphate
  modified_base 20: mod_base = OTHER; note = 2'-O-methyluridine-3'-phosphate
  modified_base 21: mod_base = OTHER; note = 2'-O-methylcytidine-3'-phosphorothioate
  modified_base 22: mod_base = OTHER; note = 2'-O-methyladenosine-3'-phosphorothioate
  modified_base 23: mod_base = OTHER; note = 2'-O-methylguanosine
tacgcaaactccatagctgtcag

SEQ ID NO: 12789 - RNA, 23 nt, synthetic construct
  source 1..23: mol_type = other RNA
  modified_base 1: mod_base = OTHER; note = 2'-O-methyluridine-3'-phosphorothioate 5'-(E)-Vinylphosphonate
  modified_base 2: mod_base = OTHER; note = 2'-deoxy-2'-fluorocytidine-3'-phosphorothioate
  modified_base 3: mod_base = OTHER; note = 2'-O-methyladenosine-3'-phosphate
  modified_base 4: mod_base = OTHER; note = 2'-O-methyladenosine-3'-phosphate
  modified_base 5: mod_base = OTHER; note = 2'-O-methyladenosine-3'-phosphate
  modified_base 6: mod_base = OTHER; note = 2'-deoxy-2'-fluorocytidine-3'-phosphate
  modified_base 7: mod_base = OTHER; note = 2'-O-methyluridine-3'-phosphate
  modified_base 8: mod_base = OTHER; note = 2'-O-methylcytidine-3'-phosphate
  modified_base 9: mod_base = OTHER; note = 2'-O-methylcytidine-3'-phosphate
  modified_base 10: mod_base = OTHER; note = 2'-O-methyladenosine-3'-phosphate
  modified_base 11: mod_base = OTHER; note = 2'-O-methyluridine-3'-phosphate
  modified_base 12: mod_base = OTHER; note = 2'-O-methyladenosine-3'-phosphate
  modified_base 13: mod_base = OTHER; note = 2'-O-methylguanosine-3'-phosphate
  modified_base 14: mod_base = OTHER; note = 2'-deoxy-2'-fluorocytidine-3'-phosphate
  modified_base 15: mod_base = OTHER; note = 2'-O-methyluridine-3'-phosphate
  modified_base 16: mod_base = OTHER; note = 2'-deoxy-2'-fluoroguanosine-3'-phosphate
  modified_base 17: mod_base = OTHER; note = 2'-O-methyluridine-3'-phosphate
  modified_base 18: mod_base = OTHER; note = 2'-O-methylcytidine-3'-phosphate
  modified_base 19: mod_base = OTHER; note = 2'-O-methyladenosine-3'-phosphate
  modified_base 20: mod_base = OTHER; note = 2'-O-methylguanosine-3'-phosphate
  modified_base 21: mod_base = OTHER; note = 2'-O-methyluridine-3'-phosphorothioate
  modified_base 22: mod_base = OTHER; note = 2'-O-methyluridine-3'-phosphorothioate
  modified_base 23: mod_base = OTHER; note = 2'-O-methyluridine
tcaaactccatagctgtcagttt

SEQ ID NO: 12790 - RNA, 23 nt, synthetic construct
  source 1..23: mol_type = other RNA
  modified_base 1: mod_base = OTHER; note = 2'-O-methyluridine-3'-phosphorothioate 5'-(E)-Vinylphosphonate
  modified_base 2: mod_base = OTHER; note = 2'-deoxy-2'-fluoroguanosine-3'-phosphorothioate
  modified_base 3: mod_base = OTHER; note = 2'-O-methylcytidine-3'-phosphate
  modified_base 4: mod_base = OTHER; note = 2'-O-methyladenosine-3'-phosphate
  modified_base 5: mod_base = OTHER; note = 2'-O-methyladenosine-3'-phosphate
  modified_base 6: mod_base = OTHER; note = 2'-deoxy-2'-fluoroadenosine-3'-phosphate
  modified_base 7: mod_base = OTHER; note = 2'-O-methylcytidine-3'-phosphate
  modified_base 8: mod_base = OTHER; note = 2'-O-methyluridine-3'-phosphate
  modified_base 9: mod_base = OTHER; note = 2'-O-methylcytidine-3'-phosphate
  modified_base 10: mod_base = OTHER; note = 2'-O-methylcytidine-3'-phosphate
  modified_base 11: mod_base = OTHER; note = 2'-O-methyladenosine-3'-phosphate
  modified_base 12: mod_base = OTHER; note = 2'-O-methyluridine-3'-phosphate
  modified_base 13: mod_base = OTHER; note = 2'-O-methyladenosine-3'-phosphate
  modified_base 14: mod_base = OTHER; note = 2'-deoxy-2'-fluoroguanosine-3'-phosphate
  modified_base 15: mod_base = OTHER; note = 2'-O-methylcytidine-3'-phosphate
  modified_base 16: mod_base = OTHER; note = 2'-deoxy-2'-fluorouridine-3'-phosphate
  modified_base 17: mod_base = OTHER; note = 2'-O-methylguanosine-3'-phosphate
  modified_base 18: mod_base = OTHER; note = 2'-O-methyluridine-3'-phosphate
  modified_base 19: mod_base = OTHER; note = 2'-O-methylcytidine-3'-phosphate
  modified_base 20: mod_base = OTHER; note = 2'-O-methyladenosine-3'-phosphate
  modified_base 21: mod_base = OTHER; note = 2'-O-methylguanosine-3'-phosphorothioate
  modified_base 22: mod_base = OTHER; note = 2'-O-methyluridine-3'-phosphorothioate
  modified_base 23: mod_base = OTHER; note = 2'-O-methyluridine
tgcaaactccatagctgtcagtt

SEQ ID NO: 12791 - RNA, 23 nt, synthetic construct
  source 1..23: mol_type = other RNA
  modified_base 1: mod_base = OTHER; note = 2'-O-methyluridine-3'-phosphorothioate 5'-(E)-Vinylphosphonate
  modified_base 2: mod_base = OTHER; note = 2'-deoxy-2'-fluorocytidine-3'-phosphorothioate
  modified_base 3: mod_base = OTHER; note = 2'-O-methylguanosine-3'-phosphate
  modified_base 4: mod_base = OTHER; note = 2'-O-methylcytidine-3'-phosphate
  modified_base 5: mod_base = OTHER; note = 2'-O-methyladenosine-3'-phosphate
  modified_base 6: mod_base = OTHER; note = 2'-deoxy-2'-fluoroadenosine-3'-phosphate
  modified_base 7: mod_base = OTHER; note = 2'-O-methyladenosine-3'-phosphate
  modified_base 8: mod_base = OTHER; note = 2'-O-methylcytidine-3'-phosphate
  modified_base 9: mod_base = OTHER; note = 2'-O-methyluridine-3'-phosphate
  modified_base 10: mod_base = OTHER; note = 2'-O-methylcytidine-3'-phosphate
  modified_base 11: mod_base = OTHER; note = 2'-O-methylcytidine-3'-phosphate
  modified_base 12: mod_base = OTHER; note = 2'-O-methyladenosine-3'-phosphate
  modified_base 13: mod_base = OTHER; note = 2'-O-methyluridine-3'-phosphate
  modified_base 14: mod_base = OTHER; note = 2'-deoxy-2'-fluoroadenosine-3'-phosphate
  modified_base 15: mod_base = OTHER; note = 2'-O-methylguanosine-3'-phosphate
  modified_base 16: mod_base = OTHER; note = 2'-deoxy-2'-fluorocytidine-3'-phosphate
  modified_base 17: mod_base = OTHER; note = 2'-O-methyluridine-3'-phosphate
  modified_base 18: mod_base = OTHER; note = 2'-O-methylguanosine-3'-phosphate
  modified_base 19: mod_base = OTHER; note = 2'-O-methyluridine-3'-phosphate
  modified_base 20: mod_base = OTHER; note = 2'-O-methylcytidine-3'-phosphate
  modified_base 21: mod_base = OTHER; note = 2'-O-methyladenosine-3'-phosphorothioate
  modified_base 22: mod_base = OTHER; note = 2'-O-methylguanosine-3'-phosphorothioate
  modified_base 23: mod_base = OTHER; note = 2'-O-methyluridine
tcgcaaactccatagctgtcagt

SEQ ID NO: 12792 - RNA, 23 nt, synthetic construct
  source 1..23: mol_type = other RNA
  modified_base 1: mod_base = OTHER; note = 2'-O-methyluridine-3'-phosphorothioate 5'-(E)-Vinylphosphonate
  modified_base 2: mod_base = OTHER; note = 2'-deoxy-2'-fluorocytidine-3'-phosphorothioate
  modified_base 3: mod_base = OTHER; note = 2'-O-methyladenosine-3'-phosphate
  modified_base 4: mod_base = OTHER; note = 2'-O-methylcytidine-3'-phosphate
  modified_base 5: mod_base = OTHER; note = 2'-O-methylguanosine-3'-phosphate
  modified_base 6: mod_base = OTHER; note = 2'-deoxy-2'-fluorocytidine-3'-phosphate
  modified_base 7: mod_base = OTHER; note = 2'-O-methyladenosine-3'-phosphate
  modified_base 8: mod_base = OTHER; note = 2'-O-methyladenosine-3'-phosphate
  modified_base 9: mod_base = OTHER; note = 2'-O-methyladenosine-3'-phosphate
  modified_base 10: mod_base = OTHER; note = 2'-O-methylcytidine-3'-phosphate
  modified_base 11: mod_base = OTHER; note = 2'-O-methyluridine-3'-phosphate
  modified_base 12: mod_base = OTHER; note = 2'-O-methylcytidine-3'-phosphate
  modified_base 13: mod_base = OTHER; note = 2'-O-methylcytidine-3'-phosphate
  modified_base 14: mod_base = OTHER; note = 2'-deoxy-2'-fluoroadenosine-3'-phosphate
  modified_base 15: mod_base = OTHER; note = 2'-O-methyluridine-3'-phosphate
  modified_base 16: mod_base = OTHER; note = 2'-deoxy-2'-fluoroadenosine-3'-phosphate
  modified_base 17: mod_base = OTHER; note = 2'-O-methylguanosine-3'-phosphate
  modified_base 18: mod_base = OTHER; note = 2'-O-methylcytidine-3'-phosphate
  modified_base 19: mod_base = OTHER; note = 2'-O-methyluridine-3'-phosphate
  modified_base 20: mod_base = OTHER; note = 2'-O-methylguanosine-3'-phosphate
  modified_base 21: mod_base = OTHER; note = 2'-O-methyluridine-3'-phosphorothioate
  modified_base 22: mod_base = OTHER; note = 2'-O-methylcytidine-3'-phosphorothioate
  modified_base 23: mod_base = OTHER; note = 2'-O-methyladenosine
tcacgcaaactccatagctgtca

SEQ ID NO: 12793 - RNA, 23 nt, synthetic construct
  source 1..23: mol_type = other RNA
  modified_base 1: mod_base = OTHER; note = 2'-O-methyluridine-3'-phosphorothioate 5'-(E)-Vinylphosphonate
  modified_base 2: mod_base = OTHER; note = 2'-deoxy-2'-fluoroadenosine-3'-phosphorothioate
  modified_base 3: mod_base = OTHER; note = 2'-O-methylcytidine-3'-phosphate
  modified_base 4: mod_base = OTHER; note = 2'-O-methyladenosine-3'-phosphate
  modified_base 5: mod_base = OTHER; note = 2'-O-methylcytidine-3'-phosphate
  modified_base 6: mod_base = OTHER; note = 2'-deoxy-2'-fluoroguanosine-3'-phosphate
  modified_base 7: mod_base = OTHER; note = 2'-O-methylcytidine-3'-phosphate
  modified_base 8: mod_base = OTHER; note = 2'-O-methyladenosine-3'-phosphate
  modified_base 9: mod_base = OTHER; note = 2'-O-methyladenosine-3'-phosphate
  modified_base 10: mod_base = OTHER; note = 2'-O-methyladenosine-3'-phosphate
  modified_base 11: mod_base = OTHER; note = 2'-O-methylcytidine-3'-phosphate
  modified_base 12: mod_base = OTHER; note = 2'-O-methyluridine-3'-phosphate
  modified_base 13: mod_base = OTHER; note = 2'-O-methylcytidine-3'-phosphate
  modified_base 14: mod_base = OTHER; note = 2'-deoxy-2'-fluorocytidine-3'-phosphate
  modified_base 15: mod_base = OTHER; note = 2'-O-methyladenosine-3'-phosphate
  modified_base 16: mod_base = OTHER; note = 2'-deoxy-2'-fluorouridine-3'-phosphate
  modified_base 17: mod_base = OTHER; note = 2'-O-methyladenosine-3'-phosphate
  modified_base 18: mod_base = OTHER; note = 2'-O-methylguanosine-3'-phosphate
  modified_base 19: mod_base = OTHER; note = 2'-O-methylcytidine-3'-phosphate
  modified_base 20: mod_base = OTHER; note = 2'-O-methyluridine-3'-phosphate
  modified_base 21: mod_base = OTHER; note = 2'-O-methylguanosine-3'-phosphorothioate
  modified_base 22: mod_base = OTHER; note = 2'-O-methyluridine-3'-phosphorothioate
  modified_base 23: mod_base = OTHER; note = 2'-O-methylcytidine
tacacgcaaactccatagctgtc

SEQ ID NO: 12794 - RNA, 23 nt, synthetic construct
  source 1..23: mol_type = other RNA
  modified_base 1: mod_base = OTHER; note = 2'-O-methyluridine-3'-phosphorothioate 5'-(E)-Vinylphosphonate
  modified_base 2: mod_base = OTHER; note = 2'-deoxy-2'-fluorouridine-3'-phosphorothioate
  modified_base 3: mod_base = OTHER; note = 2'-O-methyladenosine-3'-phosphate
  modified_base 4: mod_base = OTHER; note = 2'-O-methylcytidine-3'-phosphate
  modified_base 5: mod_base = OTHER; note = 2'-O-methyladenosine-3'-phosphate
  modified_base 6: mod_base = OTHER; note = 2'-deoxy-2'-fluorocytidine-3'-phosphate
  modified_base 7: mod_base = OTHER; note = 2'-O-methylguanosine-3'-phosphate
  modified_base 8: mod_base = OTHER; note = 2'-O-methylcytidine-3'-phosphate
  modified_base 9: mod_base = OTHER; note = 2'-O-methyladenosine-3'-phosphate
  modified_base 10: mod_base = OTHER; note = 2'-O-methyladenosine-3'-phosphate
  modified_base 11: mod_base = OTHER; note = 2'-O-methyladenosine-3'-phosphate
  modified_base 12: mod_base = OTHER; note = 2'-O-methylcytidine-3'-phosphate
  modified_base 13: mod_base = OTHER; note = 2'-O-methyluridine-3'-phosphate
  modified_base 14: mod_base = OTHER; note = 2'-deoxy-2'-fluorocytidine-3'-phosphate
  modified_base 15: mod_base = OTHER; note = 2'-O-methylcytidine-3'-phosphate
  modified_base 16: mod_base = OTHER; note = 2'-deoxy-2'-fluoroadenosine-3'-phosphate
  modified_base 17: mod_base = OTHER; note = 2'-O-methyluridine-3'-phosphate
  modified_base 18: mod_base = OTHER; note = 2'-O-methyladenosine-3'-phosphate
  modified_base 19: mod_base = OTHER; note = 2'-O-methylguanosine-3'-phosphate
  modified_base 20: mod_base = OTHER; note = 2'-O-methylcytidine-3'-phosphate
  modified_base 21: mod_base = OTHER; note = 2'-O-methyluridine-3'-phosphorothioate
  modified_base 22: mod_base = OTHER; note = 2'-O-methylguanosine-3'-phosphorothioate
  modified_base 23: mod_base = OTHER; note = 2'-O-methyluridine
ttacacgcaaactccatagctgt

SEQ ID NO: 12795 - RNA, 23 nt, synthetic construct
  source 1..23: mol_type = other RNA
  modified_base 1: mod_base = OTHER; note = 2'-O-methyluridine-3'-phosphorothioate 5'-(E)-Vinylphosphonate
  modified_base 2: mod_base = OTHER; note = 2'-deoxy-2'-fluoroguanosine-3'-phosphorothioate
  modified_base 3: mod_base = OTHER; note = 2'-O-methyluridine-3'-phosphate
  modified_base 4: mod_base = OTHER; note = 2'-O-methyladenosine-3'-phosphate
  modified_base 5: mod_base = OTHER; note = 2'-O-methylcytidine-3'-phosphate
  modified_base 6: mod_base = OTHER; note = 2'-deoxy-2'-fluoroadenosine-3'-phosphate
  modified_base 7: mod_base = OTHER; note = 2'-O-methylcytidine-3'-phosphate
  modified_base 8: mod_base = OTHER; note = 2'-O-methylguanosine-3'-phosphate
  modified_base 9: mod_base = OTHER; note = 2'-O-methylcytidine-3'-phosphate
  modified_base 10: mod_base = OTHER; note = 2'-O-methyladenosine-3'-phosphate
  modified_base 11: mod_base = OTHER; note = 2'-O-methyladenosine-3'-phosphate
  modified_base 12: mod_base = OTHER; note = 2'-O-methyladenosine-3'-phosphate
  modified_base 13: mod_base = OTHER; note = 2'-O-methylcytidine-3'-phosphate
  modified_base 14: mod_base = OTHER; note = 2'-deoxy-2'-fluorouridine-3'-phosphate
  modified_base 15: mod_base = OTHER; note = 2'-O-methylcytidine-3'-phosphate
  modified_base 16: mod_base = OTHER; note = 2'-deoxy-2'-fluorocytidine-3'-phosphate
  modified_base 17: mod_base = OTHER; note = 2'-O-methyladenosine-3'-phosphate
  modified_base 18: mod_base = OTHER; note = 2'-O-methyluridine-3'-phosphate
  modified_base 19: mod_base = OTHER; note = 2'-O-methyladenosine-3'-phosphate
  modified_base 20: mod_base = OTHER; note = 2'-O-methylguanosine-3'-phosphate
  modified_base 21: mod_base = OTHER; note = 2'-O-methylcytidine-3'-phosphorothioate
  modified_base 22: mod_base = OTHER; note = 2'-O-methyluridine-3'-phosphorothioate
  modified_base 23: mod_base = OTHER; note = 2'-O-methylguanosine
tgtacacgcaaactccatagctg

SEQ ID NO: 12796 - RNA, 23 nt, synthetic construct
  source 1..23: mol_type = other RNA
  modified_base 1: mod_base = OTHER; note = 2'-O-methyluridine-3'-phosphorothioate 5'-(E)-Vinylphosphonate
  modified_base 2: mod_base = OTHER; note = 2'-deoxy-2'-fluoroadenosine-3'-phosphorothioate
  modified_base 3: mod_base = OTHER; note = 2'-O-methylguanosine-3'-phosphate
  modified_base 4: mod_base = OTHER; note = 2'-O-methyluridine-3'-phosphate
  modified_base 5: mod_base = OTHER; note = 2'-O-methyladenosine-3'-phosphate
  modified_base 6: mod_base = OTHER; note = 2'-deoxy-2'-fluorocytidine-3'-phosphate
  modified_base 7: mod_base = OTHER; note = 2'-O-methyladenosine-3'-phosphate
  modified_base 8: mod_base = OTHER; note = 2'-O-methylcytidine-3'-phosphate
  modified_base 9: mod_base = OTHER; note = 2'-O-methylguanosine-3'-phosphate
  modified_base 10: mod_base = OTHER; note = 2'-O-methylcytidine-3'-phosphate
  modified_base 11: mod_base = OTHER; note = 2'-O-methyladenosine-3'-phosphate
  modified_base 12: mod_base = OTHER; note = 2'-O-methyladenosine-3'-phosphate
  modified_base 13: mod_base = OTHER; note = 2'-O-methyladenosine-3'-phosphate
  modified_base 14: mod_base = OTHER; note = 2'-deoxy-2'-fluorocytidine-3'-phosphate
  modified_base 15: mod_base = OTHER; note = 2'-O-methyluridine-3'-phosphate
  modified_base 16: mod_base = OTHER; note = 2'-deoxy-2'-fluorocytidine-3'-phosphate
  modified_base 17: mod_base = OTHER; note = 2'-O-methylcytidine-3'-phosphate
  modified_base 18: mod_base = OTHER; note = 2'-O-methyladenosine-3'-phosphate
  modified_base 19: mod_base = OTHER; note = 2'-O-methyluridine-3'-phosphate
  modified_base 20: mod_base = OTHER; note = 2'-O-methyladenosine-3'-phosphate
  modified_base 21: mod_base = OTHER; note = 2'-O-methylguanosine-3'-phosphorothioate
  modified_base 22: mod_base = OTHER; note = 2'-O-methylcytidine-3'-phosphorothioate
  modified_base 23: mod_base = OTHER; note = 2'-O-methyluridine
tagtacacgcaaactccatagct

SEQ ID NO: 12797 - RNA, 23 nt, synthetic construct
  source 1..23: mol_type = other RNA
  modified_base 1: mod_base = OTHER; note = 2'-O-methyluridine-3'-phosphorothioate 5'-(E)-Vinylphosphonate
  modified_base 2: mod_base = OTHER; note = 2'-deoxy-2'-fluoroadenosine-3'-phosphorothioate
  modified_base 3: mod_base = OTHER; note = 2'-O-methyladenosine-3'-phosphate
  modified_base 4: mod_base = OTHER; note = 2'-O-methylguanosine-3'-phosphate
  modified_base 5: mod_base = OTHER; note = 2'-O-methyluridine-3'-phosphate
  modified_base 6: mod_base = OTHER; note = 2'-deoxy-2'-fluoroadenosine-3'-phosphate
  modified_base 7: mod_base = OTHER; note = 2'-O-methylcytidine-3'-phosphate
  modified_base 8: mod_base = OTHER; note = 2'-O-methyladenosine-3'-phosphate
  modified_base 9: mod_base = OTHER; note = 2'-O-methylcytidine-3'-phosphate
  modified_base 10: mod_base = OTHER; note = 2'-O-methylguanosine-3'-phosphate
  modified_base 11: mod_base = OTHER; note = 2'-O-methylcytidine-3'-phosphate
  modified_base 12: mod_base = OTHER; note = 2'-O-methyladenosine-3'-phosphate
  modified_base 13: mod_base = OTHER; note = 2'-O-methyladenosine-3'-phosphate
  modified_base 14: mod_base = OTHER; note = 2'-deoxy-2'-fluoroadenosine-3'-phosphate
  modified_base 15: mod_base = OTHER; note = 2'-O-methylcytidine-3'-phosphate
  modified_base 16: mod_base = OTHER; note = 2'-deoxy-2'-fluorouridine-3'-phosphate
  modified_base 17: mod_base = OTHER; note = 2'-O-methylcytidine-3'-phosphate
  modified_base 18: mod_base = OTHER; note = 2'-O-methylcytidine-3'-phosphate
  modified_base 19: mod_base = OTHER; note = 2'-O-methyladenosine-3'-phosphate
  modified_base 20: mod_base = OTHER; note = 2'-O-methyluridine-3'-phosphate
  modified_base 21: mod_base = OTHER; note = 2'-O-methyladenosine-3'-phosphorothioate
  modified_base 22: mod_base = OTHER; note = 2'-O-methylguanosine-3'-phosphorothioate
  modified_base 23: mod_base = OTHER; note = 2'-O-methylcytidine
taagtacacgcaaactccatagc

SEQ ID NO: 12798 - RNA, 23 nt, synthetic construct
  source 1..23: mol_type = other RNA
  modified_base 1: mod_base = OTHER; note = 2'-O-methyluridine-3'-phosphorothioate 5'-(E)-Vinylphosphonate
  modified_base 2: mod_base = OTHER; note = 2'-deoxy-2'-fluoroguanosine-3'-phosphorothioate
  modified_base 3: mod_base = OTHER; note = 2'-O-methyladenosine-3'-phosphate
  modified_base 4: mod_base = OTHER; note = 2'-O-methyladenosine-3'-phosphate
  modified_base 5: mod_base = OTHER; note = 2'-O-methylguanosine-3'-phosphate
  modified_base 6: mod_base = OTHER; note = 2'-deoxy-2'-fluorouridine-3'-phosphate
  modified_base 7: mod_base = OTHER; note = 2'-O-methyladenosine-3'-phosphate
  modified_base 8: mod_base = OTHER; note = 2'-O-methylcytidine-3'-phosphate
  modified_base 9: mod_base = OTHER; note = 2'-O-methyladenosine-3'-phosphate
  modified_base 10: mod_base = OTHER; note = 2'-O-methylcytidine-3'-phosphate
  modified_base 11: mod_base = OTHER; note = 2'-O-methylguanosine-3'-phosphate
  modified_base 12: mod_base = OTHER; note = 2'-O-methylcytidine-3'-phosphate
  modified_base 13: mod_base = OTHER; note = 2'-O-methyladenosine-3'-phosphate
  modified_base 14: mod_base = OTHER; note = 2'-deoxy-2'-fluoroadenosine-3'-phosphate
  modified_base 15: mod_base = OTHER; note = 2'-O-methyladenosine-3'-phosphate
  modified_base 16: mod_base = OTHER; note = 2'-deoxy-2'-fluorocytidine-3'-phosphate
  modified_base 17: mod_base = OTHER; note = 2'-O-methyluridine-3'-phosphate
  modified_base 18: mod_base = OTHER; note = 2'-O-methylcytidine-3'-phosphate
  modified_base 19: mod_base = OTHER; note = 2'-O-methylcytidine-3'-phosphate
  modified_base 20: mod_base = OTHER; note = 2'-O-methyladenosine-3'-phosphate
  modified_base 21: mod_base = OTHER; note = 2'-O-methyluridine-3'-phosphorothioate
  modified_base 22: mod_base = OTHER; note = 2'-O-methyladenosine-3'-phosphorothioate
  modified_base 23: mod_base = OTHER; note = 2'-O-methylguanosine
tgaagtacacgcaaactccatag

SEQ ID NO: 12799 - RNA, 23 nt, synthetic construct
  source 1..23: mol_type = other RNA
  modified_base 1: mod_base = OTHER; note = 2'-O-methyluridine-3'-phosphorothioate 5'-(E)-Vinylphosphonate
  modified_base 2: mod_base = OTHER; note = 2'-deoxy-2'-fluorouridine-3'-phosphorothioate
  modified_base 3: mod_base = OTHER; note = 2'-O-methylguanosine-3'-phosphate
  modified_base 4: mod_base = OTHER; note = 2'-O-methylguanosine-3'-phosphate
  modified_base 5: mod_base = OTHER; note = 2'-O-methyladenosine-3'-phosphate
  modified_base 6: mod_base = OTHER; note = 2'-deoxy-2'-fluorouridine-3'-phosphate
  modified_base 7: mod_base = OTHER; note = 2'-O-methylguanosine-3'-phosphate
  modified_base 8: mod_base = OTHER; note = 2'-O-methyladenosine-3'-phosphate
  modified_base 9: mod_base = OTHER; note = 2'-O-methylguanosine-3'-phosphate
  modified_base 10: mod_base = OTHER; note = 2'-O-methyladenosine-3'-phosphate
  modified_base 11: mod_base = OTHER; note = 2'-O-methylguanosine-3'-phosphate
  modified_base 12: mod_base = OTHER; note = 2'-O-methylcytidine-3'-phosphate
  modified_base 13: mod_base = OTHER; note = 2'-O-methyladenosine-3'-phosphate
  modified_base 14: mod_base = OTHER; note = 2'-deoxy-2'-fluorouridine-3'-phosphate
  modified_base 15: mod_base = OTHER; note = 2'-O-methyluridine-3'-phosphate
  modified_base 16: mod_base = OTHER; note = 2'-deoxy-2'-fluoroadenosine-3'-phosphate
  modified_base 17: mod_base = OTHER; note = 2'-O-methyladenosine-3'-phosphate
  modified_base 18: mod_base = OTHER; note = 2'-O-methylcytidine-3'-phosphate
  modified_base 19: mod_base = OTHER; note = 2'-O-methylguanosine-3'-phosphate
  modified_base 20: mod_base = OTHER; note = 2'-O-methyladenosine-3'-phosphate
  modified_base 21: mod_base = OTHER; note = 2'-O-methylguanosine-3'-phosphorothioate
  modified_base 22: mod_base = OTHER; note = 2'-O-methyluridine-3'-phosphorothioate
  modified_base 23: mod_base = OTHER; note = 2'-O-methyladenosine
ttggatgagagcattaacgagta

SEQ ID NO: 12800 - RNA, 23 nt, synthetic construct
  source 1..23: mol_type = other RNA
  modified_base 1: mod_base = OTHER; note = 2'-O-methyluridine-3'-phosphorothioate 5'-(E)-Vinylphosphonate
  modified_base 2: mod_base = OTHER; note = 2'-deoxy-2'-fluoroadenosine-3'-phosphorothioate
  modified_base 3: mod_base = OTHER; note = 2'-O-methylguanosine-3'-phosphate
  modified_base 4: mod_base = OTHER; note = 2'-O-methyluridine-3'-phosphate
  modified_base 5: mod_base = OTHER; note = 2'-O-methyladenosine-3'-phosphate
  modified_base 6: mod_base = OTHER; note = 2'-deoxy-2'-fluorouridine-3'-phosphate
  modified_base 7: mod_base = OTHER; note = 2'-O-methylguanosine-3'-phosphate
  modified_base 8: mod_base = OTHER; note = 2'-O-methylguanosine-3'-phosphate
  modified_base 9: mod_base = OTHER; note = 2'-O-methyladenosine-3'-phosphate
  modified_base 10: mod_base = OTHER; note = 2'-O-methyladenosine-3'-phosphate
  modified_base 11: mod_base = OTHER; note = 2'-O-methylguanosine-3'-phosphate
  modified_base 12: mod_base = OTHER; note = 2'-O-methyluridine-3'-phosphate
  modified_base 13: mod_base = OTHER; note = 2'-O-methyladenosine-3'-phosphate
  modified_base 14: mod_base = OTHER; note = 2'-deoxy-2'-fluorocytidine-3'-phosphate
  modified_base 15: mod_base = OTHER; note = 2'-O-methyladenosine-3'-phosphate
  modified_base 16: mod_base = OTHER; note = 2'-deoxy-2'-fluorocytidine-3'-phosphate
  modified_base 17: mod_base = OTHER; note = 2'-O-methylguanosine-3'-phosphate
  modified_base 18: mod_base = OTHER; note = 2'-O-methylcytidine-3'-phosphate
  modified_base 19: mod_base = OTHER; note = 2'-O-methyladenosine-3'-phosphate
  modified_base 20: mod_base = OTHER; note = 2'-O-methyladenosine-3'-phosphate
  modified_base 21: mod_base = OTHER; note = 2'-O-methyladenosine-3'-phosphorothioate
  modified_base 22: mod_base = OTHER; note = 2'-O-methylcytidine-3'-phosphorothioate
  modified_base 23: mod_base = OTHER; note = 2'-O-methyluridine
tagtatggaagtacacgcaaact

SEQ ID NO: 12801 - RNA, 23 nt, synthetic construct
  source 1..23: mol_type = other RNA
  modified_base 1: mod_base = OTHER; note = 2'-O-methyluridine-3'-phosphorothioate 5'-(E)-Vinylphosphonate
  modified_base 2: mod_base = OTHER; note = 2'-deoxy-2'-fluorocytidine-3'-phosphorothioate
  modified_base 3: mod_base = OTHER; note = 2'-O-methylguanosine-3'-phosphate
  modified_base 4: mod_base = OTHER; note = 2'-O-methyladenosine-3'-phosphate
  modified_base 5: mod_base = OTHER; note = 2'-O-methylguanosine-3'-phosphate
  modified_base 6: mod_base = OTHER; note = 2'-deoxy-2'-fluorouridine-3'-phosphate
  modified_base 7: mod_base = OTHER; note = 2'-O-methyladenosine-3'-phosphate
  modified_base 8: mod_base = OTHER; note = 2'-O-methyluridine-3'-phosphate
  modified_base 9: mod_base = OTHER; note = 2'-O-methylguanosine-3'-phosphate
  modified_base 10: mod_base = OTHER; note = 2'-O-methylguanosine-3'-phosphate
  modified_base 11: mod_base = OTHER; note = 2'-O-methyladenosine-3'-phosphate
  modified_base 12: mod_base = OTHER; note = 2'-O-methyladenosine-3'-phosphate
  modified_base 13: mod_base = OTHER; note = 2'-O-methylguanosine-3'-phosphate
  modified_base 14: mod_base = OTHER; note = 2'-deoxy-2'-fluorouridine-3'-phosphate
  modified_base 15: mod_base = OTHER; note = 2'-O-methyladenosine-3'-phosphate
  modified_base 16: mod_base = OTHER; note = 2'-deoxy-2'-fluorocytidine-3'-phosphate
  modified_base 17: mod_base = OTHER; note = 2'-O-methyladenosine-3'-phosphate
  modified_base 18: mod_base = OTHER; note = 2'-O-methylcytidine-3'-phosphate
  modified_base 19: mod_base = OTHER; note = 2'-O-methylguanosine-3'-phosphate
  modified_base 20: mod_base = OTHER; note = 2'-O-methylcytidine-3'-phosphate
  modified_base 21: mod_base = OTHER; note = 2'-O-methyladenosine-3'-phosphorothioate
  modified_base 22: mod_base = OTHER; note = 2'-O-methyladenosine-3'-phosphorothioate
  modified_base 23: mod_base = OTHER; note = 2'-O-methyladenosine
tcgagtatggaagtacacgcaaa

SEQ ID NO: 12802 - RNA, 23 nt, synthetic construct
  source 1..23: mol_type = other RNA
  modified_base 1: mod_base = OTHER; note = 2'-O-methyluridine-3'-phosphorothioate 5'-(E)-Vinylphosphonate
  modified_base 2: mod_base = OTHER; note = 2'-deoxy-2'-fluoroadenosine-3'-phosphorothioate
  modified_base 3: mod_base = OTHER; note = 2'-O-methylcytidine-3'-phosphate
  modified_base 4: mod_base = OTHER; note = 2'-O-methylguanosine-3'-phosphate
  modified_base 5: mod_base = OTHER; note = 2'-O-methyladenosine-3'-phosphate
  modified_base 6: mod_base = OTHER; note = 2'-deoxy-2'-fluoroguanosine-3'-phosphate
  modified_base 7: mod_base = OTHER; note = 2'-O-methyluridine-3'-phosphate
  modified_base 8: mod_base = OTHER; note = 2'-O-methyladenosine-3'-phosphate
  modified_base 9: mod_base = OTHER; note = 2'-O-methyluridine-3'-phosphate
  modified_base 10: mod_base = OTHER; note = 2'-O-methylguanosine-3'-phosphate
  modified_base 11: mod_base = OTHER; note = 2'-O-methylguanosine-3'-phosphate
  modified_base 12: mod_base = OTHER; note = 2'-O-methyladenosine-3'-phosphate
  modified_base 13: mod_base = OTHER; note = 2'-O-methyladenosine-3'-phosphate
  modified_base 14: mod_base = OTHER; note = 2'-deoxy-2'-fluoroguanosine-3'-phosphate
  modified_base 15: mod_base = OTHER; note = 2'-O-methyluridine-3'-phosphate
  modified_base 16: mod_base = OTHER; note = 2'-deoxy-2'-fluoroadenosine-3'-phosphate
  modified_base 17: mod_base = OTHER; note = 2'-O-methylcytidine-3'-phosphate
  modified_base 18: mod_base = OTHER; note = 2'-O-methyladenosine-3'-phosphate
  modified_base 19: mod_base = OTHER; note = 2'-O-methylcytidine-3'-phosphate
  modified_base 20: mod_base = OTHER; note = 2'-O-methylguanosine-3'-phosphate
  modified_base 21: mod_base = OTHER; note = 2'-O-methylcytidine-3'-phosphorothioate
  modified_base 22: mod_base = OTHER; note = 2'-O-methyladenosine-3'-phosphorothioate
  modified_base 23: mod_base = OTHER; note = 2'-O-methyladenosine
tacgagtatggaagtacacgcaa

SEQ ID NO: 12803 - RNA, 23 nt, synthetic construct
  source 1..23: mol_type = other RNA
  modified_base 1: mod_base = OTHER; note = 2'-O-methyluridine-3'-phosphorothioate 5'-(E)-Vinylphosphonate
  modified_base 2: mod_base = OTHER; note = 2'-deoxy-2'-fluoroadenosine-3'-phosphorothioate
  modified_base 3: mod_base = OTHER; note = 2'-O-methyladenosine-3'-phosphate
  modified_base 4: mod_base = OTHER; note = 2'-O-methylcytidine-3'-phosphate
  modified_base 5: mod_base = OTHER; note = 2'-O-methylguanosine-3'-phosphate
  modified_base 6: mod_base = OTHER; note = 2'-deoxy-2'-fluoroadenosine-3'-phosphate
  modified_base 7: mod_base = OTHER; note = 2'-O-methylguanosine-3'-phosphate
  modified_base 8: mod_base = OTHER; note = 2'-O-methyluridine-3'-phosphate
  modified_base 9: mod_base = OTHER; note = 2'-O-methyladenosine-3'-phosphate
  modified_base 10: mod_base = OTHER; note = 2'-O-methyluridine-3'-phosphate
  modified_base 11: mod_base = OTHER; note = 2'-O-methylguanosine-3'-phosphate
  modified_base 12: mod_base = OTHER; note = 2'-O-methylguanosine-3'-phosphate
  modified_base 13: mod_base = OTHER; note = 2'-O-methyladenosine-3'-phosphate
  modified_base 14: mod_base = OTHER; note = 2'-deoxy-2'-fluoroadenosine-3'-phosphate
  modified_base 15: mod_base = OTHER; note = 2'-O-methylguanosine-3'-phosphate
  modified_base 16: mod_base = OTHER; note = 2'-deoxy-2'-fluorouridine-3'-phosphate
  modified_base 17: mod_base = OTHER; note = 2'-O-methyladenosine-3'-phosphate
  modified_base 18: mod_base = OTHER; note = 2'-O-methylcytidine-3'-phosphate
  modified_base 19: mod_base = OTHER; note = 2'-O-methyladenosine-3'-phosphate
  modified_base 20: mod_base = OTHER; note = 2'-O-methylcytidine-3'-phosphate
  modified_base 21: mod_base = OTHER; note = 2'-O-methylguanosine-3'-phosphorothioate
  modified_base 22: mod_base = OTHER; note = 2'-O-methylcytidine-3'-phosphorothioate
  modified_base 23: mod_base = OTHER; note = 2'-O-methyladenosine
taacgagtatggaagtacacgca

SEQ ID NO: 12804 - RNA, 23 nt, synthetic construct
  source 1..23: mol_type = other RNA
  modified_base 1: mod_base = OTHER; note = 2'-O-methyluridine-3'-phosphorothioate 5'-(E)-Vinylphosphonate
  modified_base 2: mod_base = OTHER; note = 2'-deoxy-2'-fluorouridine-3'-phosphorothioate
  modified_base 3: mod_base = OTHER; note = 2'-O-methyladenosine-3'-phosphate
  modified_base 4: mod_base = OTHER; note = 2'-O-methyladenosine-3'-phosphate
  modified_base 5: mod_base = OTHER; note = 2'-O-methylcytidine-3'-phosphate
  modified_base 6: mod_base = OTHER; note = 2'-deoxy-2'-fluoroguanosine-3'-phosphate
  modified_base 7: mod_base = OTHER; note = 2'-O-methyladenosine-3'-phosphate
  modified_base 8: mod_base = OTHER; note = 2'-O-methylguanosine-3'-phosphate
  modified_base 9: mod_base = OTHER; note = 2'-O-methyluridine-3'-phosphate
  modified_base 10: mod_base = OTHER; note = 2'-O-methyladenosine-3'-phosphate
  modified_base 11: mod_base = OTHER; note = 2'-O-methyluridine-3'-phosphate
  modified_base 12: mod_base = OTHER; note = 2'-O-methylguanosine-3'-phosphate
  modified_base 13: mod_base = OTHER; note = 2'-O-methylguanosine-3'-phosphate
  modified_base 14: mod_base = OTHER; note = 2'-deoxy-2'-fluoroadenosine-3'-phosphate
  modified_base 15: mod_base = OTHER; note = 2'-O-methyladenosine-3'-phosphate
  modified_base 16: mod_base = OTHER; note = 2'-deoxy-2'-fluoroguanosine-3'-phosphate
  modified_base 17: mod_base = OTHER; note = 2'-O-methyluridine-3'-phosphate
  modified_base 18: mod_base = OTHER; note = 2'-O-methyladenosine-3'-phosphate
  modified_base 19: mod_base = OTHER; note = 2'-O-methylcytidine-3'-phosphate
  modified_base 20: mod_base = OTHER; note = 2'-O-methyladenosine-3'-phosphate
  modified_base 21: mod_base = OTHER; note = 2'-O-methylcytidine-3'-phosphorothioate
  modified_base 22: mod_base = OTHER; note = 2'-O-methylguanosine-3'-phosphorothioate
  modified_base 23: mod_base = OTHER; note = 2'-O-methylcytidine
ttaacgagtatggaagtacacgc

SEQ ID NO: 12805 - RNA, 23 nt, synthetic construct
  source 1..23: mol_type = other RNA
  modified_base 1: mod_base = OTHER; note = 2'-O-methyluridine-3'-phosphorothioate 5'-(E)-Vinylphosphonate
  modified_base 2: mod_base = OTHER; note = 2'-deoxy-2'-fluorouridine-3'-phosphorothioate
  modified_base 3: mod_base = OTHER; note = 2'-O-methyluridine-3'-phosphate
  modified_base 4: mod_base = OTHER; note = 2'-O-methyladenosine-3'-phosphate
  modified_base 5: mod_base = OTHER; note = 2'-O-methyladenosine-3'-phosphate
  modified_base 6: mod_base = OTHER; note = 2'-deoxy-2'-fluorocytidine-3'-phosphate
  modified_base 7: mod_base = OTHER; note = 2'-O-methylguanosine-3'-phosphate
  modified_base 8: mod_base = OTHER; note = 2'-O-methyladenosine-3'-phosphate
  modified_base 9: mod_base = OTHER; note = 2'-O-methylguanosine-3'-phosphate
  modified_base 10: mod_base = OTHER; note = 2'-O-methyluridine-3'-phosphate
  modified_base 11: mod_base = OTHER; note = 2'-O-methyladenosine-3'-phosphate
  modified_base 12: mod_base = OTHER; note = 2'-O-methyluridine-3'-phosphate
  modified_base 13: mod_base = OTHER; note = 2'-O-methylguanosine-3'-phosphate
  modified_base 14: mod_base = OTHER; note = 2'-deoxy-2'-fluoroguanosine-3'-phosphate
  modified_base 15: mod_base = OTHER; note = 2'-O-methyladenosine-3'-phosphate
  modified_base 16: mod_base = OTHER; note = 2'-deoxy-2'-fluoroadenosine-3'-phosphate
  modified_base 17: mod_base = OTHER; note = 2'-O-methylguanosine-3'-phosphate
  modified_base 18: mod_base = OTHER; note = 2'-O-methyluridine-3'-phosphate
  modified_base 19: mod_base = OTHER; note = 2'-O-methyladenosine-3'-phosphate
  modified_base 20: mod_base = OTHER; note = 2'-O-methylcytidine-3'-phosphate
  modified_base 21: mod_base = OTHER; note = 2'-O-methyladenosine-3'-phosphorothioate
  modified_base 22: mod_base = OTHER; note = 2'-O-methylcytidine-3'-phosphorothioate
  modified_base 23: mod_base = OTHER; note = 2'-O-methylguanosine
tttaacgagtatggaagtacacg

SEQ ID NO: 12806 - RNA, 23 nt, synthetic construct
  source 1..23: mol_type = other RNA
  modified_base 1: mod_base = OTHER; note = 2'-O-methyluridine-3'-phosphorothioate 5'-(E)-Vinylphosphonate
  modified_base 2: mod_base = OTHER; note = 2'-deoxy-2'-fluoroadenosine-3'-phosphorothioate
  modified_base 3: mod_base = OTHER; note = 2'-O-methyluridine-3'-phosphate
  modified_base 4: mod_base = OTHER; note = 2'-O-methyluridine-3'-phosphate
  modified_base 5: mod_base = OTHER; note = 2'-O-methyladenosine-3'-phosphate
  modified_base 6: mod_base = OTHER; note = 2'-deoxy-2'-fluoroadenosine-3'-phosphate
  modified_base 7: mod_base = OTHER; note = 2'-O-methylcytidine-3'-phosphate
  modified_base 8: mod_base = OTHER; note = 2'-O-methylguanosine-3'-phosphate
  modified_base 9: mod_base = OTHER; note = 2'-O-methyladenosine-3'-phosphate
  modified_base 10: mod_base = OTHER; note = 2'-O-methylguanosine-3'-phosphate
  modified_base 11: mod_base = OTHER; note = 2'-O-methyluridine-3'-phosphate
  modified_base 12: mod_base = OTHER; note = 2'-O-methyladenosine-3'-phosphate
  modified_base 13: mod_base = OTHER; note = 2'-O-methyluridine-3'-phosphate
  modified_base 14: mod_base = OTHER; note = 2'-deoxy-2'-fluoroguanosine-3'-phosphate
  modified_base 15: mod_base = OTHER; note = 2'-O-methylguanosine-3'-phosphate
  modified_base 16: mod_base = OTHER; note = 2'-deoxy-2'-fluoroadenosine-3'-phosphate
  modified_base 17: mod_base = OTHER; note = 2'-O-methyladenosine-3'-phosphate
  modified_base 18: mod_base = OTHER; note = 2'-O-methylguanosine-3'-phosphate
  modified_base 19: mod_base = OTHER; note = 2'-O-methyluridine-3'-phosphate
  modified_base 20: mod_base = OTHER; note = 2'-O-methyladenosine-3'-phosphate
  modified_base 21: mod_base = OTHER; note = 2'-O-methylcytidine-3'-phosphorothioate
  modified_base 22: mod_base = OTHER; note = 2'-O-methyladenosine-3'-phosphorothioate
  modified_base 23: mod_base = OTHER; note = 2'-O-methylcytidine
tattaacgagtatggaagtacac

SEQ ID NO: 12807 - RNA, 23 nt, synthetic construct
  source 1..23: mol_type = other RNA
  modified_base 1: mod_base = OTHER; note = 2'-O-methyluridine-3'-phosphorothioate 5'-(E)-Vinylphosphonate
  modified_base 2: mod_base = OTHER; note = 2'-deoxy-2'-fluorocytidine-3'-phosphorothioate
  modified_base 3: mod_base = OTHER; note = 2'-O-methyladenosine-3'-phosphate
  modified_base 4: mod_base = OTHER; note = 2'-O-methyluridine-3'-phosphate
  modified_base 5: mod_base = OTHER; note = 2'-O-methyluridine-3'-phosphate
  modified_base 6: mod_base = OTHER; note = 2'-deoxy-2'-fluoroadenosine-3'-phosphate
  modified_base 7: mod_base = OTHER; note = 2'-O-methyladenosine-3'-phosphate
  modified_base 8: mod_base = OTHER; note = 2'-O-methylcytidine-3'-phosphate
  modified_base 9: mod_base = OTHER; note = 2'-O-methylguanosine-3'-phosphate
  modified_base 10: mod_base = OTHER; note = 2'-O-methyladenosine-3'-phosphate
  modified_base 11: mod_base = OTHER; note = 2'-O-methylguanosine-3'-phosphate
  modified_base 12: mod_base = OTHER; note = 2'-O-methyluridine-3'-phosphate
  modified_base 13: mod_base = OTHER; note = 2'-O-methyladenosine-3'-phosphate
  modified_base 14: mod_base = OTHER; note = 2'-deoxy-2'-fluorouridine-3'-phosphate
  modified_base 15: mod_base = OTHER; note = 2'-O-methylguanosine-3'-phosphate
  modified_base 16: mod_base = OTHER; note = 2'-deoxy-2'-fluoroguanosine-3'-phosphate
  modified_base 17: mod_base = OTHER; note = 2'-O-methyladenosine-3'-phosphate
  modified_base 18: mod_base = OTHER; note = 2'-O-methyladenosine-3'-phosphate
  modified_base 19: mod_base = OTHER; note = 2'-O-methylguanosine-3'-phosphate
  modified_base 20: mod_base = OTHER; note = 2'-O-methyluridine-3'-phosphate
  modified_base 21: mod_base = OTHER; note = 2'-O-methyladenosine-3'-phosphorothioate
  modified_base 22: mod_base = OTHER; note = 2'-O-methylcytidine-3'-phosphorothioate
  modified_base 23: mod_base = OTHER; note = 2'-O-methyladenosine
tcattaacgagtatggaagtaca

SEQ ID NO: 12808 - RNA, 23 nt, synthetic construct
  source 1..23: mol_type = other RNA
  modified_base 1: mod_base = OTHER; note = 2'-O-methyluridine-3'-phosphorothioate 5'-(E)-Vinylphosphonate
  modified_base 2: mod_base = OTHER; note = 2'-deoxy-2'-fluoroguanosine-3'-phosphorothioate
  modified_base 3: mod_base = OTHER; note = 2'-O-methylcytidine-3'-phosphate
  modified_base 4: mod_base = OTHER; note = 2'-O-methyladenosine-3'-phosphate
  modified_base 5: mod_base = OTHER; note = 2'-O-methyluridine-3'-phosphate
  modified_base 6: mod_base = OTHER; note = 2'-deoxy-2'-fluorouridine-3'-phosphate
  modified_base 7: mod_base = OTHER; note = 2'-O-methyladenosine-3'-phosphate
  modified_base 8: mod_base = OTHER; note = 2'-O-methyladenosine-3'-phosphate
  modified_base 9: mod_base = OTHER; note = 2'-O-methylcytidine-3'-phosphate
  modified_base 10: mod_base = OTHER; note = 2'-O-methylguanosine-3'-phosphate
  modified_base 11: mod_base = OTHER; note = 2'-O-methyladenosine-3'-phosphate
  modified_base 12: mod_base = OTHER; note = 2'-O-methylguanosine-3'-phosphate
  modified_base 13: mod_base = OTHER; note = 2'-O-methyluridine-3'-phosphate
  modified_base 14: mod_base = OTHER; note = 2'-deoxy-2'-fluoroadenosine-3'-phosphate
  modified_base 15: mod_base = OTHER; note = 2'-O-methyluridine-3'-phosphate
  modified_base 16: mod_base = OTHER; note = 2'-deoxy-2'-fluoroguanosine-3'-phosphate
  modified_base 17: mod_base = OTHER; note = 2'-O-methylguanosine-3'-phosphate
  modified_base 18: mod_base = OTHER; note = 2'-O-methyladenosine-3'-phosphate
  modified_base 19: mod_base = OTHER; note = 2'-O-methyladenosine-3'-phosphate
  modified_base 20: mod_base = OTHER; note = 2'-O-methylguanosine-3'-phosphate
  modified_base 21: mod_base = OTHER; note = 2'-O-methyluridine-3'-phosphorothioate
  modified_base 22: mod_base = OTHER; note = 2'-O-methyladenosine-3'-phosphorothioate
  modified_base 23: mod_base = OTHER; note = 2'-O-methylcytidine
tgcattaacgagtatggaagtac

SEQ ID NO: 12809 - RNA, 23 nt, synthetic construct
  source 1..23: mol_type = other RNA
  modified_base 1: mod_base = OTHER; note = 2'-O-methyluridine-3'-phosphorothioate 5'-(E)-Vinylphosphonate
  modified_base 2: mod_base = OTHER; note = 2'-deoxy-2'-fluoroadenosine-3'-phosphorothioate
  modified_base 3: mod_base = OTHER; note = 2'-O-methylguanosine-3'-phosphate
  modified_base 4: mod_base = OTHER; note = 2'-O-methylcytidine-3'-phosphate
  modified_base 5: mod_base = OTHER; note = 2'-O-methyladenosine-3'-phosphate
  modified_base 6: mod_base = OTHER; note = 2'-deoxy-2'-fluorouridine-3'-phosphate
  modified_base 7: mod_base = OTHER; note = 2'-O-methyluridine-3'-phosphate
  modified_base 8: mod_base = OTHER; note = 2'-O-methyladenosine-3'-phosphate
  modified_base 9: mod_base = OTHER; note = 2'-O-methyladenosine-3'-phosphate
  modified_base 10: mod_base = OTHER; note = 2'-O-methylcytidine-3'-phosphate
  modified_base 11: mod_base = OTHER; note = 2'-O-methylguanosine-3'-phosphate
  modified_base 12: mod_base = OTHER; note = 2'-O-methyladenosine-3'-phosphate
  modified_base 13: mod_base = OTHER; note = 2'-O-methylguanosine-3'-phosphate
  modified_base 14: mod_base = OTHER; note = 2'-deoxy-2'-fluorouridine-3'-phosphate
  modified_base 15: mod_base = OTHER; note = 2'-O-methyladenosine-3'-phosphate
  modified_base 16: mod_base = OTHER; note = 2'-deoxy-2'-fluorouridine-3'-phosphate
  modified_base 17: mod_base = OTHER; note = 2'-O-methylguanosine-3'-phosphate
  modified_base 18: mod_base = OTHER; note = 2'-O-methylguanosine-3'-phosphate
  modified_base 19: mod_base = OTHER; note = 2'-O-methyladenosine-3'-phosphate
  modified_base 20: mod_base = OTHER; note = 2'-O-methyladenosine-3'-phosphate
  modified_base 21: mod_base = OTHER; note = 2'-O-methylguanosine-3'-phosphorothioate
  modified_base 22: mod_base = OTHER; note = 2'-O-methyluridine-3'-phosphorothioate
  modified_base 23: mod_base = OTHER; note = 2'-O-methyladenosine
tagcattaacgagtatggaagta

SEQ ID NO: 12810 - RNA, 23 nt, synthetic construct
  source 1..23: mol_type = other RNA
  modified_base 1: mod_base = OTHER; note = 2'-O-methyluridine-3'-phosphorothioate 5'-(E)-Vinylphosphonate
  modified_base 2: mod_base = OTHER; note = 2'-deoxy-2'-fluoroguanosine-3'-phosphorothioate
  modified_base 3: mod_base = OTHER; note = 2'-O-methyladenosine-3'-phosphate
  modified_base 4: mod_base = OTHER; note = 2'-O-methylguanosine-3'-phosphate
  modified_base 5: mod_base = OTHER; note = 2'-O-methylcytidine-3'-phosphate
  modified_base 6: mod_base = OTHER; note = 2'-deoxy-2'-fluoroadenosine-3'-phosphate
  modified_base 7: mod_base = OTHER; note = 2'-O-methyluridine-3'-phosphate
  modified_base 8: mod_base = OTHER; note = 2'-O-methyluridine-3'-phosphate
  modified_base 9: mod_base = OTHER; note = 2'-O-methyladenosine-3'-phosphate
  modified_base 10: mod_base = OTHER; note = 2'-O-methyladenosine-3'-phosphate
  modified_base 11: mod_base = OTHER; note = 2'-O-methylcytidine-3'-phosphate
  modified_base 12: mod_base = OTHER; note = 2'-O-methylguanosine-3'-phosphate
  modified_base 13: mod_base = OTHER; note = 2'-O-methyladenosine-3'-phosphate
  modified_base 14: mod_base = OTHER; note = 2'-deoxy-2'-fluoroguanosine-3'-phosphate
  modified_base 15: mod_base = OTHER; note = 2'-O-methyluridine-3'-phosphate
  modified_base 16: mod_base = OTHER; note = 2'-deoxy-2'-fluoroadenosine-3'-phosphate
  modified_base 17: mod_base = OTHER; note = 2'-O-methyluridine-3'-phosphate
  modified_base 18: mod_base = OTHER; note = 2'-O-methylguanosine-3'-phosphate
  modified_base 19: mod_base = OTHER; note = 2'-O-methylguanosine-3'-phosphate
  modified_base 20: mod_base = OTHER; note = 2'-O-methyladenosine-3'-phosphate
  modified_base 21: mod_base = OTHER; note = 2'-O-methyladenosine-3'-phosphorothioate
  modified_base 22: mod_base = OTHER; note = 2'-O-methylguanosine-3'-phosphorothioate
  modified_base 23: mod_base = OTHER; note = 2'-O-methyluridine
tgagcattaacgagtatggaagt

SEQ ID NO: 12811 - RNA, 23 nt, synthetic construct
  source 1..23: mol_type = other RNA
  modified_base 1: mod_base = OTHER; note = 2'-O-methyluridine-3'-phosphorothioate 5'-(E)-Vinylphosphonate
  modified_base 2: mod_base = OTHER; note = 2'-deoxy-2'-fluoroadenosine-3'-phosphorothioate
  modified_base 3: mod_base = OTHER; note = 2'-O-methylguanosine-3'-phosphate
  modified_base 4: mod_base = OTHER; note = 2'-O-methyladenosine-3'-phosphate
  modified_base 5: mod_base = OTHER; note = 2'-O-methylguanosine-3'-phosphate
  modified_base 6: mod_base = OTHER; note = 2'-deoxy-2'-fluorocytidine-3'-phosphate
  modified_base 7: mod_base = OTHER; note = 2'-O-methyladenosine-3'-phosphate
  modified_base 8: mod_base = OTHER; note = 2'-O-methyluridine-3'-phosphate
  modified_base 9: mod_base = OTHER; note = 2'-O-methyluridine-3'-phosphate
  modified_base 10: mod_base = OTHER; note = 2'-O-methyladenosine-3'-phosphate
  modified_base 11: mod_base = OTHER; note = 2'-O-methyladenosine-3'-phosphate
  modified_base 12: mod_base = OTHER; note = 2'-O-methylcytidine-3'-phosphate
  modified_base 13: mod_base = OTHER; note = 2'-O-methylguanosine-3'-phosphate
  modified_base 14: mod_base = OTHER; note = 2'-deoxy-2'-fluoroadenosine-3'-phosphate
  modified_base 15: mod_base = OTHER; note = 2'-O-methylguanosine-3'-phosphate
  modified_base 16: mod_base = OTHER; note = 2'-deoxy-2'-fluorouridine-3'-phosphate
  modified_base 17: mod_base = OTHER; note = 2'-O-methyladenosine-3'-phosphate
  modified_base 18: mod_base = OTHER; note = 2'-O-methyluridine-3'-phosphate
  modified_base 19: mod_base = OTHER; note = 2'-O-methylguanosine-3'-phosphate
  modified_base 20: mod_base = OTHER; note = 2'-O-methylguanosine-3'-phosphate
  modified_base 21: mod_base = OTHER; note = 2'-O-methyladenosine-3'-phosphorothioate
  modified_base 22: mod_base = OTHER; note = 2'-O-methyladenosine-3'-phosphorothioate
  modified_base 23: mod_base = OTHER; note = 2'-O-methylguanosine
tagagcattaacgagtatggaag

SEQ ID NO: 12812 - RNA, 23 nt, synthetic construct
  source 1..23: mol_type = other RNA
  modified_base 1: mod_base = OTHER; note = 2'-O-methyluridine-3'-phosphorothioate 5'-(E)-Vinylphosphonate
  modified_base 2: mod_base = OTHER; note = 2'-deoxy-2'-fluoroguanosine-3'-phosphorothioate
  modified_base 3: mod_base = OTHER; note = 2'-O-methyladenosine-3'-phosphate
  modified_base 4: mod_base = OTHER; note = 2'-O-methylguanosine-3'-phosphate
  modified_base 5: mod_base = OTHER; note = 2'-O-methyladenosine-3'-phosphate
  modified_base 6: mod_base = OTHER; note = 2'-deoxy-2'-fluoroguanosine-3'-phosphate
  modified_base 7: mod_base = OTHER; note = 2'-O-methylcytidine-3'-phosphate
  modified_base 8: mod_base = OTHER; note = 2'-O-methyladenosine-3'-phosphate
  modified_base 9: mod_base = OTHER; note = 2'-O-methyluridine-3'-phosphate
  modified_base 10: mod_base = OTHER; note = 2'-O-methyluridine-3'-phosphate
  modified_base 11: mod_base = OTHER; note = 2'-O-methyladenosine-3'-phosphate
  modified_base 12: mod_base = OTHER; note = 2'-O-methyladenosine-3'-phosphate
  modified_base 13: mod_base = OTHER; note = 2'-O-methylcytidine-3'-phosphate
  modified_base 14: mod_base = OTHER; note = 2'-deoxy-2'-fluoroguanosine-3'-phosphate
  modified_base 15: mod_base = OTHER; note = 2'-O-methyladenosine-3'-phosphate
  modified_base 16: mod_base = OTHER; note = 2'-deoxy-2'-fluoroguanosine-3'-phosphate
  modified_base 17: mod_base = OTHER; note = 2'-O-methyluridine-3'-phosphate
  modified_base 18: mod_base = OTHER; note = 2'-O-methyladenosine-3'-phosphate
  modified_base 19: mod_base = OTHER; note = 2'-O-methyluridine-3'-phosphate
  modified_base 20: mod_base = OTHER; note = 2'-O-methylguanosine-3'-phosphate
  modified_base 21: mod_base = OTHER; note = 2'-O-methylguanosine-3'-phosphorothioate
  modified_base 22: mod_base = OTHER; note = 2'-O-methyladenosine-3'-phosphorothioate
  modified_base 23: mod_base = OTHER; note = 2'-O-methyladenosine
tgagagcattaacgagtatggaa

SEQ ID NO: 12813 - RNA, 23 nt, synthetic construct
  source 1..23: mol_type = other RNA
  modified_base 1: mod_base = OTHER; note = 2'-O-methyluridine-3'-phosphorothioate 5'-(E)-Vinylphosphonate
  modified_base 2: mod_base = OTHER; note = 2'-deoxy-2'-fluorouridine-3'-phosphorothioate
  modified_base 3: mod_base = OTHER; note = 2'-O-methylguanosine-3'-phosphate
  modified_base 4: mod_base = OTHER; note = 2'-O-methyladenosine-3'-phosphate
  modified_base 5: mod_base = OTHER; note = 2'-O-methylguanosine-3'-phosphate
  modified_base 6: mod_base = OTHER; note = 2'-deoxy-2'-fluoroadenosine-3'-phosphate
  modified_base 7: mod_base = OTHER; note = 2'-O-methylguanosine-3'-phosphate
  modified_base 8: mod_base = OTHER; note = 2'-O-methylcytidine-3'-phosphate
  modified_base 9: mod_base = OTHER; note = 2'-O-methyladenosine-3'-phosphate
  modified_base 10: mod_base = OTHER; note = 2'-O-methyluridine-3'-phosphate
  modified_base 11: mod_base = OTHER; note = 2'-O-methyluridine-3'-phosphate
  modified_base 12: mod_base = OTHER; note = 2'-O-methyladenosine-3'-phosphate
  modified_base 13: mod_base = OTHER; note = 2'-O-methyladenosine-3'-phosphate
  modified_base 14: mod_base = OTHER; note = 2'-deoxy-2'-fluorocytidine-3'-phosphate
  modified_base 15: mod_base = OTHER; note = 2'-O-methylguanosine-3'-phosphate
  modified_base 16: mod_base = OTHER; note = 2'-deoxy-2'-fluoroadenosine-3'-phosphate
  modified_base 17: mod_base = OTHER; note = 2'-O-methylguanosine-3'-phosphate
  modified_base 18: mod_base = OTHER; note = 2'-O-methyluridine-3'-phosphate
  modified_base 19: mod_base = OTHER; note = 2'-O-methyladenosine-3'-phosphate
  modified_base 20: mod_base = OTHER; note = 2'-O-methyluridine-3'-phosphate
  modified_base 21: mod_base = OTHER; note = 2'-O-methylguanosine-3'-phosphorothioate
  modified_base 22: mod_base = OTHER; note = 2'-O-methylguanosine-3'-phosphorothioate
  modified_base 23: mod_base = OTHER; note = 2'-O-methyladenosine
ttgagagcattaacgagtatgga

SEQ ID NO: 12814 - RNA, 23 nt, synthetic construct
  source 1..23: mol_type = other RNA
  modified_base 1: mod_base = OTHER; note = 2'-O-methyluridine-3'-phosphorothioate 5'-(E)-Vinylphosphonate
  modified_base 2: mod_base = OTHER; note = 2'-deoxy-2'-fluoroadenosine-3'-phosphorothioate
  modified_base 3: mod_base = OTHER; note = 2'-O-methyluridine-3'-phosphate
  modified_base 4: mod_base = OTHER; note = 2'-O-methylguanosine-3'-phosphate
  modified_base 5: mod_base = OTHER; note = 2'-O-methyladenosine-3'-phosphate
  modified_base 6: mod_base = OTHER; note = 2'-deoxy-2'-fluoroguanosine-3'-phosphate
  modified_base 7: mod_base = OTHER; note = 2'-O-methyladenosine-3'-phosphate
  modified_base 8: mod_base = OTHER; note = 2'-O-methylguanosine-3'-phosphate
  modified_base 9: mod_base = OTHER; note = 2'-O-methylcytidine-3'-phosphate
  modified_base 10: mod_base = OTHER; note = 2'-O-methyladenosine-3'-phosphate
  modified_base 11: mod_base = OTHER; note = 2'-O-methyluridine-3'-phosphate
  modified_base 12: mod_base = OTHER; note = 2'-O-methyluridine-3'-phosphate
  modified_base 13: mod_base = OTHER; note = 2'-O-methyladenosine-3'-phosphate
  modified_base 14: mod_base = OTHER; note = 2'-deoxy-2'-fluoroadenosine-3'-phosphate
  modified_base 15: mod_base = OTHER; note = 2'-O-methylcytidine-3'-phosphate
  modified_base 16: mod_base = OTHER; note = 2'-deoxy-2'-fluoroguanosine-3'-phosphate
  modified_base 17: mod_base = OTHER; note = 2'-O-methyladenosine-3'-phosphate
  modified_base 18: mod_base = OTHER; note = 2'-O-methylguanosine-3'-phosphate
  modified_base 19: mod_base = OTHER; note = 2'-O-methyluridine-3'-phosphate
  modified_base 20: mod_base = OTHER; note = 2'-O-methyladenosine-3'-phosphate
  modified_base 21: mod_base = OTHER; note = 2'-O-methyluridine-3'-phosphorothioate
  modified_base 22: mod_base = OTHER; note = 2'-O-methylguanosine-3'-phosphorothioate
  modified_base 23: mod_base = OTHER; note = 2'-O-methylguanosine
tatgagagcattaacgagtatgg

SEQ ID NO: 12815 - RNA, 23 nt, synthetic construct
  source 1..23: mol_type = other RNA
  modified_base 1: mod_base = OTHER; note = 2'-O-methyluridine-3'-phosphorothioate 5'-(E)-Vinylphosphonate
  modified_base 2: mod_base = OTHER; note = 2'-deoxy-2'-fluoroguanosine-3'-phosphorothioate
  modified_base 3: mod_base = OTHER; note = 2'-O-methyluridine-3'-phosphate
  modified_base 4: mod_base = OTHER; note = 2'-O-methylguanosine-3'-phosphate
  modified_base 5: mod_base = OTHER; note = 2'-O-methylguanosine-3'-phosphate
  modified_base 6: mod_base = OTHER; note = 2'-deoxy-2'-fluoroadenosine-3'-phosphate
  modified_base 7: mod_base = OTHER; note = 2'-O-methyluridine-3'-phosphate
  modified_base 8: mod_base = OTHER; note = 2'-O-methylguanosine-3'-phosphate
  modified_base 9: mod_base = OTHER; note = 2'-O-methyladenosine-3'-phosphate
  modified_base 10: mod_base = OTHER; note = 2'-O-methylguanosine-3'-phosphate
  modified_base 11: mod_base = OTHER; note = 2'-O-methyladenosine-3'-phosphate
  modified_base 12: mod_base = OTHER; note = 2'-O-methylguanosine-3'-phosphate
  modified_base 13: mod_base = OTHER; note = 2'-O-methylcytidine-3'-phosphate
  modified_base 14: mod_base = OTHER; note = 2'-deoxy-2'-fluoroadenosine-3'-phosphate
  modified_base 15: mod_base = OTHER; note = 2'-O-methyluridine-3'-phosphate
  modified_base 16: mod_base = OTHER; note = 2'-deoxy-2'-fluorouridine-3'-phosphate
  modified_base 17: mod_base = OTHER; note = 2'-O-methyladenosine-3'-phosphate
  modified_base 18: mod_base = OTHER; note = 2'-O-methyladenosine-3'-phosphate
  modified_base 19: mod_base = OTHER; note = 2'-O-methylcytidine-3'-phosphate
  modified_base 20: mod_base = OTHER; note = 2'-O-methylguanosine-3'-phosphate
  modified_base 21: mod_base = OTHER; note = 2'-O-methyladenosine-3'-phosphorothioate
  modified_base 22: mod_base = OTHER; note = 2'-O-methylguanosine-3'-phosphorothioate
  modified_base 23: mod_base = OTHER; note = 2'-O-methyluridine
tgtggatgagagcattaacgagt

SEQ ID NO: 12816 - RNA, 23 nt, synthetic construct
  source 1..23: mol_type = other RNA
  modified_base 1: mod_base = OTHER; note = 2'-O-methyluridine-3'-phosphorothioate 5'-(E)-Vinylphosphonate
  modified_base 2: mod_base = OTHER; note = 2'-deoxy-2'-fluoroadenosine-3'-phosphorothioate
  modified_base 3: mod_base = OTHER; note = 2'-O-methylguanosine-3'-phosphate
  modified_base 4: mod_base = OTHER; note = 2'-O-methyluridine-3'-phosphate
  modified_base 5: mod_base = OTHER; note = 2'-O-methylguanosine-3'-phosphate
  modified_base 6: mod_base = OTHER; note = 2'-deoxy-2'-fluoroguanosine-3'-phosphate
  modified_base 7: mod_base = OTHER; note = 2'-O-methyladenosine-3'-phosphate
  modified_base 8: mod_base = OTHER; note = 2'-O-methyluridine-3'-phosphate
  modified_base 9: mod_base = OTHER; note = 2'-O-methylguanosine-3'-phosphate
  modified_base 10: mod_base = OTHER; note = 2'-O-methyladenosine-3'-phosphate
  modified_base 11: mod_base = OTHER; note = 2'-O-methylguanosine-3'-phosphate
  modified_base 12: mod_base = OTHER; note = 2'-O-methyladenosine-3'-phosphate
  modified_base 13: mod_base = OTHER; note = 2'-O-methylguanosine-3'-phosphate
  modified_base 14: mod_base = OTHER; note = 2'-deoxy-2'-fluorocytidine-3'-phosphate
  modified_base 15: mod_base = OTHER; note = 2'-O-methyladenosine-3'-phosphate
  modified_base 16: mod_base = OTHER; note = 2'-deoxy-2'-fluorouridine-3'-phosphate
  modified_base 17: mod_base = OTHER; note = 2'-O-methyluridine-3'-phosphate
  modified_base 18: mod_base = OTHER; note = 2'-O-methyladenosine-3'-phosphate
  modified_base 19: mod_base = OTHER; note = 2'-O-methyladenosine-3'-phosphate
  modified_base 20: mod_base = OTHER; note = 2'-O-methylcytidine-3'-phosphate
  modified_base 21: mod_base = OTHER; note = 2'-O-methylguanosine-3'-phosphorothioate
  modified_base 22: mod_base = OTHER; note = 2'-O-methyladenosine-3'-phosphorothioate
  modified_base 23: mod_base = OTHER; note = 2'-O-methylguanosine
tagtggatgagagcattaacgag

SEQ ID NO: 12817 - RNA, 23 nt, synthetic construct
  source 1..23: mol_type = other RNA
  modified_base 1: mod_base = OTHER; note = 2'-O-methyluridine-3'-phosphorothioate 5'-(E)-Vinylphosphonate
  modified_base 2: mod_base = OTHER; note = 2'-deoxy-2'-fluoroadenosine-3'-phosphorothioate
  modified_base 3: mod_base = OTHER; note = 2'-O-methyladenosine-3'-phosphate
  modified_base 4: mod_base = OTHER; note = 2'-O-methylguanosine-3'-phosphate
  modified_base 5: mod_base = OTHER; note = 2'-O-methyluridine-3'-phosphate
  modified_base 6: mod_base = OTHER; note = 2'-deoxy-2'-fluoroguanosine-3'-phosphate
  modified_base 7: mod_base = OTHER; note = 2'-O-methylguanosine-3'-phosphate
  modified_base 8: mod_base = OTHER; note = 2'-O-methyladenosine-3'-phosphate
  modified_base 9: mod_base = OTHER; note = 2'-O-methyluridine-3'-phosphate
  modified_base 10: mod_base = OTHER; note = 2'-O-methylguanosine-3'-phosphate
  modified_base 11: mod_base = OTHER; note = 2'-O-methyladenosine-3'-phosphate
  modified_base 12: mod_base = OTHER; note = 2'-O-methylguanosine-3'-phosphate
  modified_base 13: mod_base = OTHER; note = 2'-O-methyladenosine-3'-phosphate
  modified_base 14: mod_base = OTHER; note = 2'-deoxy-2'-fluoroguanosine-3'-phosphate
  modified_base 15: mod_base = OTHER; note = 2'-O-methylcytidine-3'-phosphate
  modified_base 16: mod_base = OTHER; note = 2'-deoxy-2'-fluoroadenosine-3'-phosphate
  modified_base 17: mod_base = OTHER; note = 2'-O-methyluridine-3'-phosphate
  modified_base 18: mod_base = OTHER; note = 2'-O-methyluridine-3'-phosphate
  modified_base 19: mod_base = OTHER; note = 2'-O-methyladenosine-3'-phosphate
  modified_base 20: mod_base = OTHER; note = 2'-O-methyladenosine-3'-phosphate
  modified_base 21: mod_base = OTHER; note = 2'-O-methylcytidine-3'-phosphorothioate
  modified_base 22: mod_base = OTHER; note = 2'-O-methylguanosine-3'-phosphorothioate
  modified_base 23: mod_base = OTHER; note = 2'-O-methyladenosine
taagtggatgagagcattaacga

SEQ ID NO: 12818 - RNA, 23 nt, synthetic construct
  source 1..23: mol_type = other RNA
  modified_base 1: mod_base = OTHER; note = 2'-O-methyluridine-3'-phosphorothioate 5'-(E)-Vinylphosphonate
  modified_base 2: mod_base = OTHER; note = 2'-deoxy-2'-fluorouridine-3'-phosphorothioate
  modified_base 3: mod_base = OTHER; note = 2'-O-methyladenosine-3'-phosphate
  modified_base 4: mod_base = OTHER; note = 2'-O-methyladenosine-3'-phosphate
  modified_base 5: mod_base = OTHER; note = 2'-O-methylguanosine-3'-phosphate
  modified_base 6: mod_base = OTHER; note = 2'-deoxy-2'-fluorouridine-3'-phosphate
  modified_base 7: mod_base = OTHER; note = 2'-O-methylguanosine-3'-phosphate
  modified_base 8: mod_base = OTHER; note = 2'-O-methylguanosine-3'-phosphate
  modified_base 9: mod_base = OTHER; note = 2'-O-methyladenosine-3'-phosphate
  modified_base 10: mod_base = OTHER; note = 2'-O-methyluridine-3'-phosphate
  modified_base 11: mod_base = OTHER; note = 2'-O-methylguanosine-3'-phosphate
  modified_base 12: mod_base = OTHER; note = 2'-O-methyladenosine-3'-phosphate
  modified_base 13: mod_base = OTHER; note = 2'-O-methylguanosine-3'-phosphate
  modified_base 14: mod_base = OTHER; note = 2'-deoxy-2'-fluoroadenosine-3'-phosphate
  modified_base 15: mod_base = OTHER; note = 2'-O-methylguanosine-3'-phosphate
  modified_base 16: mod_base = OTHER; note = 2'-deoxy-2'-fluorocytidine-3'-phosphate
  modified_base 17: mod_base = OTHER; note = 2'-O-methyladenosine-3'-phosphate
  modified_base 18: mod_base = OTHER; note = 2'-O-methyluridine-3'-phosphate
  modified_base 19: mod_base = OTHER; note = 2'-O-methyluridine-3'-phosphate
  modified_base 20: mod_base = OTHER; note = 2'-O-methyladenosine-3'-phosphate
  modified_base 21: mod_base = OTHER; note = 2'-O-methyladenosine-3'-phosphorothioate
  modified_base 22: mod_base = OTHER; note = 2'-O-methylcytidine-3'-phosphorothioate
  modified_base 23: mod_base = OTHER; note = 2'-O-methylguanosine
ttaagtggatgagagcattaacg

SEQ ID NO: 12819 - RNA, 23 nt, synthetic construct
  source 1..23: mol_type = other RNA
  modified_base 1: mod_base = OTHER; note = 2'-O-methyluridine-3'-phosphorothioate 5'-(E)-Vinylphosphonate
  modified_base 2: mod_base = OTHER; note = 2'-deoxy-2'-fluoroadenosine-3'-phosphorothioate
  modified_base 3: mod_base = OTHER; note = 2'-O-methyluridine-3'-phosphate
  modified_base 4: mod_base = OTHER; note = 2'-O-methyladenosine-3'-phosphate
  modified_base 5: mod_base = OTHER; note = 2'-O-methyladenosine-3'-phosphate
  modified_base 6: mod_base = OTHER; note = 2'-deoxy-2'-fluoroguanosine-3'-phosphate
  modified_base 7: mod_base = OTHER; note = 2'-O-methyluridine-3'-phosphate
  modified_base 8: mod_base = OTHER; note = 2'-O-methylguanosine-3'-phosphate
  modified_base 9: mod_base = OTHER; note = 2'-O-methylguanosine-3'-phosphate
  modified_base 10: mod_base = OTHER; note = 2'-O-methyladenosine-3'-phosphate
  modified_base 11: mod_base = OTHER; note = 2'-O-methyluridine-3'-phosphate
  modified_base 12: mod_base = OTHER; note = 2'-O-methylguanosine-3'-phosphate
  modified_base 13: mod_base = OTHER; note = 2'-O-methyladenosine-3'-phosphate
  modified_base 14: mod_base = OTHER; note = 2'-deoxy-2'-fluoroguanosine-3'-phosphate
  modified_base 15: mod_base = OTHER; note = 2'-O-methyladenosine-3'-phosphate
  modified_base 16: mod_base = OTHER; note = 2'-deoxy-2'-fluoroguanosine-3'-phosphate
  modified_base 17: mod_base = OTHER; note = 2'-O-methylcytidine-3'-phosphate
  modified_base 18: mod_base = OTHER; note = 2'-O-methyladenosine-3'-phosphate
  modified_base 19: mod_base = OTHER; note = 2'-O-methyluridine-3'-phosphate
  modified_base 20: mod_base = OTHER; note = 2'-O-methyluridine-3'-phosphate
  modified_base 21: mod_base = OTHER; note = 2'-O-methyladenosine-3'-phosphorothioate
  modified_base 22: mod_base = OTHER; note = 2'-O-methyladenosine-3'-phosphorothioate
  modified_base 23: mod_base = OTHER; note = 2'-O-methylcytidine
tataagtggatgagagcattaac

SEQ ID NO: 12820 - RNA, 23 nt, synthetic construct
  source 1..23: mol_type = other RNA
  modified_base 1: mod_base = OTHER; note = 2'-O-methyluridine-3'-phosphorothioate 5'-(E)-Vinylphosphonate
  modified_base 2: mod_base = OTHER; note = 2'-deoxy-2'-fluoroadenosine-3'-phosphorothioate
  modified_base 3: mod_base = OTHER; note = 2'-O-methyladenosine-3'-phosphate
  modified_base 4: mod_base = OTHER; note = 2'-O-methyluridine-3'-phosphate
  modified_base 5: mod_base = OTHER; note = 2'-O-methyladenosine-3'-phosphate
  modified_base 6: mod_base = OTHER; note = 2'-deoxy-2'-fluoroadenosine-3'-phosphate
  modified_base 7: mod_base = OTHER; note = 2'-O-methylguanosine-3'-phosphate
  modified_base 8: mod_base = OTHER; note = 2'-O-methyluridine-3'-phosphate
  modified_base 9: mod_base = OTHER; note = 2'-O-methylguanosine-3'-phosphate
  modified_base 10: mod_base = OTHER; note = 2'-O-methylguanosine-3'-phosphate
  modified_base 11: mod_base = OTHER; note = 2'-O-methyladenosine-3'-phosphate
  modified_base 12: mod_base = OTHER; note = 2'-O-methyluridine-3'-phosphate
  modified_base 13: mod_base = OTHER; note = 2'-O-methylguanosine-3'-phosphate
  modified_base 14: mod_base = OTHER; note = 2'-deoxy-2'-fluoroadenosine-3'-phosphate
  modified_base 15: mod_base = OTHER; note = 2'-O-methylguanosine-3'-phosphate
  modified_base 16: mod_base = OTHER; note = 2'-deoxy-2'-fluoroadenosine-3'-phosphate
  modified_base 17: mod_base = OTHER; note = 2'-O-methylguanosine-3'-phosphate
  modified_base 18: mod_base = OTHER; note = 2'-O-methylcytidine-3'-phosphate
  modified_base 19: mod_base = OTHER; note = 2'-O-methyladenosine-3'-phosphate
  modified_base 20: mod_base = OTHER; note = 2'-O-methyluridine-3'-phosphate
  modified_base 21: mod_base = OTHER; note = 2'-O-methyluridine-3'-phosphorothioate
  modified_base 22: mod_base = OTHER; note = 2'-O-methyladenosine-3'-phosphorothioate
  modified_base 23: mod_base = OTHER; note = 2'-O-methyladenosine
taataagtggatgagagcattaa

SEQ ID NO: 12821 - RNA, 23 nt, synthetic construct
  source 1..23: mol_type = other RNA
  modified_base 1: mod_base = OTHER; note = 2'-O-methyluridine-3'-phosphorothioate 5'-(E)-Vinylphosphonate
  modified_base 2: mod_base = OTHER; note = 2'-deoxy-2'-fluorouridine-3'-phosphorothioate
  modified_base 3: mod_base = OTHER; note = 2'-O-methyladenosine-3'-phosphate
  modified_base 4: mod_base = OTHER; note = 2'-O-methyladenosine-3'-phosphate
  modified_base 5: mod_base = OTHER; note = 2'-O-methyluridine-3'-phosphate
  modified_base 6: mod_base = OTHER; note = 2'-deoxy-2'-fluoroadenosine-3'-phosphate
  modified_base 7: mod_base = OTHER; note = 2'-O-methyladenosine-3'-phosphate
  modified_base 8: mod_base = OTHER; note = 2'-O-methylguanosine-3'-phosphate
  modified_base 9: mod_base = OTHER; note = 2'-O-methyluridine-3'-phosphate
  modified_base 10: mod_base = OTHER; note = 2'-O-methylguanosine-3'-phosphate
  modified_base 11: mod_base = OTHER; note = 2'-O-methylguanosine-3'-phosphate
  modified_base 12: mod_base = OTHER; note = 2'-O-methyladenosine-3'-phosphate
  modified_base 13: mod_base = OTHER; note = 2'-O-methyluridine-3'-phosphate
  modified_base 14: mod_base = OTHER; note = 2'-deoxy-2'-fluoroguanosine-3'-phosphate
  modified_base 15: mod_base = OTHER; note = 2'-O-methyladenosine-3'-phosphate
  modified_base 16: mod_base = OTHER; note = 2'-deoxy-2'-fluoroguanosine-3'-phosphate
  modified_base 17: mod_base = OTHER; note = 2'-O-methyladenosine-3'-phosphate
  modified_base 18: mod_base = OTHER; note = 2'-O-methylguanosine-3'-phosphate
  modified_base 19: mod_base = OTHER; note = 2'-O-methylcytidine-3'-phosphate
  modified_base 20: mod_base = OTHER; note = 2'-O-methyladenosine-3'-phosphate
  modified_base 21: mod_base = OTHER; note = 2'-O-methyluridine-3'-phosphorothioate
  modified_base 22: mod_base = OTHER; note = 2'-O-methyluridine-3'-phosphorothioate
  modified_base 23: mod_base = OTHER; note = 2'-O-methyladenosine
ttaataagtggatgagagcatta

SEQ ID NO: 12822 - RNA, 23 nt, synthetic construct
  source 1..23: mol_type = other RNA
  modified_base 1: mod_base = OTHER; note = 2'-O-methyluridine-3'-phosphorothioate 5'-(E)-Vinylphosphonate
  modified_base 2: mod_base = OTHER; note = 2'-deoxy-2'-fluorouridine-3'-phosphorothioate
  modified_base 3: mod_base = OTHER; note = 2'-O-methyluridine-3'-phosphate
  modified_base 4: mod_base = OTHER; note = 2'-O-methyladenosine-3'-phosphate
  modified_base 5: mod_base = OTHER; note = 2'-O-methyladenosine-3'-phosphate
  modified_base 6: mod_base = OTHER; note = 2'-deoxy-2'-fluorouridine-3'-phosphate
  modified_base 7: mod_base = OTHER; note = 2'-O-methyladenosine-3'-phosphate
  modified_base 8: mod_base = OTHER; note = 2'-O-methyladenosine-3'-phosphate
  modified_base 9: mod_base = OTHER; note = 2'-O-methylguanosine-3'-phosphate
  modified_base 10: mod_base = OTHER; note = 2'-O-methyluridine-3'-phosphate
  modified_base 11: mod_base = OTHER; note = 2'-O-methylguanosine-3'-phosphate
  modified_base 12: mod_base = OTHER; note = 2'-O-methylguanosine-3'-phosphate
  modified_base 13: mod_base = OTHER; note = 2'-O-methyladenosine-3'-phosphate
  modified_base 14: mod_base = OTHER; note = 2'-deoxy-2'-fluorouridine-3'-phosphate
  modified_base 15: mod_base = OTHER; note = 2'-O-methylguanosine-3'-phosphate
  modified_base 16: mod_base = OTHER; note = 2'-deoxy-2'-fluoroadenosine-3'-phosphate
  modified_base 17: mod_base = OTHER; note = 2'-O-methylguanosine-3'-phosphate
  modified_base 18: mod_base = OTHER; note = 2'-O-methyladenosine-3'-phosphate
  modified_base 19: mod_base = OTHER; note = 2'-O-methylguanosine-3'-phosphate
  modified_base 20: mod_base = OTHER; note = 2'-O-methylcytidine-3'-phosphate
  modified_base 21: mod_base = OTHER; note = 2'-O-methyladenosine-3'-phosphorothioate
  modified_base 22: mod_base = OTHER; note = 2'-O-methyluridine-3'-phosphorothioate
  modified_base 23: mod_base = OTHER; note = 2'-O-methyluridine
tttaataagtggatgagagcatt

SEQ ID NO: 12823 - RNA, 23 nt, synthetic construct
  source 1..23: mol_type = other RNA
  modified_base 1: mod_base = OTHER; note = 2'-O-methyluridine-3'-phosphorothioate 5'-(E)-Vinylphosphonate
  modified_base 2: mod_base = OTHER; note = 2'-deoxy-2'-fluorouridine-3'-phosphorothioate
  modified_base 3: mod_base = OTHER; note = 2'-O-methyluridine-3'-phosphate
  modified_base 4: mod_base = OTHER; note = 2'-O-methyluridine-3'-phosphate
  modified_base 5: mod_base = OTHER; note = 2'-O-methyladenosine-3'-phosphate
  modified_base 6: mod_base = OTHER; note = 2'-deoxy-2'-fluoroadenosine-3'-phosphate
  modified_base 7: mod_base = OTHER; note = 2'-O-methyluridine-3'-phosphate
  modified_base 8: mod_base = OTHER; note = 2'-O-methyladenosine-3'-phosphate
  modified_base 9: mod_base = OTHER; note = 2'-O-methyladenosine-3'-phosphate
  modified_base 10: mod_base = OTHER; note = 2'-O-methylguanosine-3'-phosphate
  modified_base 11: mod_base = OTHER; note = 2'-O-methyluridine-3'-phosphate
  modified_base 12: mod_base = OTHER; note = 2'-O-methylguanosine-3'-phosphate
  modified_base 13: mod_base = OTHER; note = 2'-O-methylguanosine-3'-phosphate
  modified_base 14: mod_base = OTHER; note = 2'-deoxy-2'-fluoroadenosine-3'-phosphate
  modified_base 15: mod_base = OTHER; note = 2'-O-methyluridine-3'-phosphate
  modified_base 16: mod_base = OTHER; note = 2'-deoxy-2'-fluoroguanosine-3'-phosphate
  modified_base 17: mod_base = OTHER; note = 2'-O-methyladenosine-3'-phosphate
  modified_base 18: mod_base = OTHER; note = 2'-O-methylguanosine-3'-phosphate
  modified_base 19: mod_base = OTHER; note = 2'-O-methyladenosine-3'-phosphate
  modified_base 20: mod_base = OTHER; note = 2'-O-methylguanosine-3'-phosphate
  modified_base 21: mod_base = OTHER; note = 2'-O-methylcytidine-3'-phosphorothioate
  modified_base 22: mod_base = OTHER; note = 2'-O-methyladenosine-3'-phosphorothioate
  modified_base 23: mod_base = OTHER; note = 2'-O-methyluridine
ttttaataagtggatgagagcat

SEQ ID NO: 12824 - RNA, 23 nt, synthetic construct
  source 1..23: mol_type = other RNA
  modified_base 1: mod_base = OTHER; note = 2'-O-methyluridine-3'-phosphorothioate 5'-(E)-Vinylphosphonate
  modified_base 2: mod_base = OTHER; note = 2'-deoxy-2'-fluoroadenosine-3'-phosphorothioate
  modified_base 3: mod_base = OTHER; note = 2'-O-methyluridine-3'-phosphate
  modified_base 4: mod_base = OTHER; note = 2'-O-methyluridine-3'-phosphate
  modified_base 5: mod_base = OTHER; note = 2'-O-methyluridine-3'-phosphate
  modified_base 6: mod_base = OTHER; note = 2'-deoxy-2'-fluoroadenosine-3'-phosphate
  modified_base 7: mod_base = OTHER; note = 2'-O-methyladenosine-3'-phosphate
  modified_base 8: mod_base = OTHER; note = 2'-O-methyluridine-3'-phosphate
  modified_base 9: mod_base = OTHER; note = 2'-O-methyladenosine-3'-phosphate
  modified_base 10: mod_base = OTHER; note = 2'-O-methyladenosine-3'-phosphate
  modified_base 11: mod_base = OTHER; note = 2'-O-methylguanosine-3'-phosphate
  modified_base 12: mod_base = OTHER; note = 2'-O-methyluridine-3'-phosphate
  modified_base 13: mod_base = OTHER; note = 2'-O-methylguanosine-3'-phosphate
  modified_base 14: mod_base = OTHER; note = 2'-deoxy-2'-fluoroguanosine-3'-phosphate
  modified_base 15: mod_base = OTHER; note = 2'-O-methyladenosine-3'-phosphate
  modified_base 16: mod_base = OTHER; note = 2'-deoxy-2'-fluorouridine-3'-phosphate
  modified_base 17: mod_base = OTHER; note = 2'-O-methylguanosine-3'-phosphate
  modified_base 18: mod_base = OTHER; note = 2'-O-methyladenosine-3'-phosphate
  modified_base 19: mod_base = OTHER; note = 2'-O-methylguanosine-3'-phosphate
  modified_base 20: mod_base = OTHER; note = 2'-O-methyladenosine-3'-phosphate
  modified_base 21: mod_base = OTHER; note = 2'-O-methylguanosine-3'-phosphorothioate
  modified_base 22: mod_base = OTHER; note = 2'-O-methylcytidine-3'-phosphorothioate
  modified_base 23: mod_base = OTHER; note = 2'-O-methyladenosine
tatttaataagtggatgagagca

SEQ ID NO: 12825 - RNA, 23 nt, synthetic construct
  source 1..23: mol_type = other RNA
  modified_base 1: mod_base = OTHER; note = 2'-O-methyluridine-3'-phosphorothioate 5'-(E)-Vinylphosphonate
  modified_base 2: mod_base = OTHER; note = 2'-deoxy-2'-fluorouridine-3'-phosphorothioate
  modified_base 3: mod_base = OTHER; note = 2'-O-methyladenosine-3'-phosphate
  modified_base 4: mod_base = OTHER; note = 2'-O-methyluridine-3'-phosphate
  modified_base 5: mod_base = OTHER; note = 2'-O-methyluridine-3'-phosphate
  modified_base 6: mod_base = OTHER; note = 2'-deoxy-2'-fluorouridine-3'-phosphate
  modified_base 7: mod_base = OTHER; note = 2'-O-methyladenosine-3'-phosphate
  modified_base 8: mod_base = OTHER; note = 2'-O-methyladenosine-3'-phosphate
  modified_base 9: mod_base = OTHER; note = 2'-O-methyluridine-3'-phosphate
  modified_base 10: mod_base = OTHER; note = 2'-O-methyladenosine-3'-phosphate
  modified_base 11: mod_base = OTHER; note = 2'-O-methyladenosine-3'-phosphate
  modified_base 12: mod_base = OTHER; note = 2'-O-methylguanosine-3'-phosphate
  modified_base 13: mod_base = OTHER; note = 2'-O-methyluridine-3'-phosphate
  modified_base 14: mod_base = OTHER; note = 2'-deoxy-2'-fluoroguanosine-3'-phosphate
  modified_base 15: mod_base = OTHER; note = 2'-O-methylguanosine-3'-phosphate
  modified_base 16: mod_base = OTHER; note = 2'-deoxy-2'-fluoroadenosine-3'-phosphate
  modified_base 17: mod_base = OTHER; note = 2'-O-methyluridine-3'-phosphate
  modified_base 18: mod_base = OTHER; note = 2'-O-methylguanosine-3'-phosphate
  modified_base 19: mod_base = OTHER; note = 2'-O-methyladenosine-3'-phosphate
  modified_base 20: mod_base = OTHER; note = 2'-O-methylguanosine-3'-phosphate
  modified_base 21: mod_base = OTHER; note = 2'-O-methyladenosine-3'-phosphorothioate
  modified_base 22: mod_base = OTHER; note = 2'-O-methylguanosine-3'-phosphorothioate
  modified_base 23: mod_base = OTHER; note = 2'-O-methylcytidine
ttatttaataagtggatgagagc

SEQ ID NO: 12826 - RNA, 23 nt, synthetic construct
  source 1..23: mol_type = other RNA
  modified_base 1: mod_base = OTHER; note = 2'-O-methyluridine-3'-phosphorothioate 5'-(E)-Vinylphosphonate
  modified_base 2: mod_base = OTHER; note = 2'-deoxy-2'-fluorouridine-3'-phosphorothioate
  modified_base 3: mod_base = OTHER; note = 2'-O-methyluridine-3'-phosphate
  modified_base 4: mod_base = OTHER; note = 2'-O-methyladenosine-3'-phosphate
  modified_base 5: mod_base = OTHER; note = 2'-O-methyluridine-3'-phosphate
  modified_base 6: mod_base = OTHER; note = 2'-deoxy-2'-fluorouridine-3'-phosphate
  modified_base 7: mod_base = OTHER; note = 2'-O-methyluridine-3'-phosphate
  modified_base 8: mod_base = OTHER; note = 2'-O-methyladenosine-3'-phosphate
  modified_base 9: mod_base = OTHER; note = 2'-O-methyladenosine-3'-phosphate
  modified_base 10: mod_base = OTHER; note = 2'-O-methyluridine-3'-phosphate
  modified_base 11: mod_base = OTHER; note = 2'-O-methyladenosine-3'-phosphate
  modified_base 12: mod_base = OTHER; note = 2'-O-methyladenosine-3'-phosphate
  modified_base 13: mod_base = OTHER; note = 2'-O-methylguanosine-3'-phosphate
  modified_base 14: mod_base = OTHER; note = 2'-deoxy-2'-fluorouridine-3'-phosphate
  modified_base 15: mod_base = OTHER; note = 2'-O-methylguanosine-3'-phosphate
  modified_base 16: mod_base = OTHER; note = 2'-deoxy-2'-fluoroguanosine-3'-phosphate
  modified_base 17: mod_base = OTHER; note = 2'-O-methyladenosine-3'-phosphate
  modified_base 18: mod_base = OTHER; note = 2'-O-methyluridine-3'-phosphate
  modified_base 19: mod_base = OTHER; note = 2'-O-methylguanosine-3'-phosphate
  modified_base 20: mod_base = OTHER; note = 2'-O-methyladenosine-3'-phosphate
  modified_base 21: mod_base = OTHER; note = 2'-O-methylguanosine-3'-phosphorothioate
  modified_base 22: mod_base = OTHER; note = 2'-O-methyladenosine-3'-phosphorothioate
  modified_base 23: mod_base = OTHER; note = 2'-O-methylguanosine
tttatttaataagtggatgagag

SEQ ID NO: 12827 - RNA, 23 nt, synthetic construct
  source 1..23: mol_type = other RNA
  modified_base 1: mod_base = OTHER; note = 2'-O-methyluridine-3'-phosphorothioate 5'-(E)-Vinylphosphonate
  modified_base 2: mod_base = OTHER; note = 2'-deoxy-2'-fluoroguanosine-3'-phosphorothioate
  modified_base 3: mod_base = OTHER; note = 2'-O-methylguanosine-3'-phosphate
  modified_base 4: mod_base = OTHER; note = 2'-O-methyluridine-3'-phosphate
  modified_base 5: mod_base = OTHER; note = 2'-O-methylguanosine-3'-phosphate
  modified_base 6: mod_base = OTHER; note = 2'-deoxy-2'-fluorocytidine-3'-phosphate
  modified_base 7: mod_base = OTHER; note = 2'-O-methyluridine-3'-phosphate
  modified_base 8: mod_base = OTHER; note = 2'-O-methylcytidine-3'-phosphate
  modified_base 9: mod_base = OTHER; note = 2'-O-methyluridine-3'-phosphate
  modified_base 10: mod_base = OTHER; note = 2'-O-methyladenosine-3'-phosphate
  modified_base 11: mod_base = OTHER; note = 2'-O-methyluridine-3'-phosphate
  modified_base 12: mod_base = OTHER; note = 2'-O-methylguanosine-3'-phosphate
  modified_base 13: mod_base = OTHER; note = 2'-O-methyladenosine-3'-phosphate
  modified_base 14: mod_base = OTHER; note = 2'-deoxy-2'-fluorouridine-3'-phosphate
  modified_base 15: mod_base = OTHER; note = 2'-O-methyluridine-3'-phosphate
  modified_base 16: mod_base = OTHER; note = 2'-deoxy-2'-fluoroadenosine-3'-phosphate
  modified_base 17: mod_base = OTHER; note = 2'-O-methyluridine-3'-phosphate
  modified_base 18: mod_base = OTHER; note = 2'-O-methyluridine-3'-phosphate
  modified_base 19: mod_base = OTHER; note = 2'-O-methyluridine-3'-phosphate
  modified_base 20: mod_base = OTHER; note = 2'-O-methyladenosine-3'-phosphate
  modified_base 21: mod_base = OTHER; note = 2'-O-methyladenosine-3'-phosphorothioate
  modified_base 22: mod_base = OTHER; note = 2'-O-methyluridine-3'-phosphorothioate
  modified_base 23: mod_base = OTHER; note = 2'-O-methyladenosine
tggtgctctatgattatttaata

SEQ ID NO: 12828 - RNA, 23 nt, synthetic construct
  source 1..23: mol_type = other RNA
  modified_base 1: mod_base = OTHER; note = 2'-O-methyluridine-3'-phosphorothioate 5'-(E)-Vinylphosphonate
  modified_base 2: mod_base = OTHER; note = 2'-deoxy-2'-fluoroguanosine-3'-phosphorothioate
  modified_base 3: mod_base = OTHER; note = 2'-O-methylguanosine-3'-phosphate
  modified_base 4: mod_base = OTHER; note = 2'-O-methylguanosine-3'-phosphate
  modified_base 5: mod_base = OTHER; note = 2'-O-methyluridine-3'-phosphate
  modified_base 6: mod_base = OTHER; note = 2'-deoxy-2'-fluoroguanosine-3'-phosphate
  modified_base 7: mod_base = OTHER; note = 2'-O-methylcytidine-3'-phosphate
  modified_base 8: mod_base = OTHER; note = 2'-O-methyluridine-3'-phosphate
  modified_base 9: mod_base = OTHER; note = 2'-O-methylcytidine-3'-phosphate
  modified_base 10: mod_base = OTHER; note = 2'-O-methyluridine-3'-phosphate
  modified_base 11: mod_base = OTHER; note = 2'-O-methyladenosine-3'-phosphate
  modified_base 12: mod_base = OTHER; note = 2'-O-methyluridine-3'-phosphate
  modified_base 13: mod_base = OTHER; note = 2'-O-methylguanosine-3'-phosphate
  modified_base 14: mod_base = OTHER; note = 2'-deoxy-2'-fluoroadenosine-3'-phosphate
  modified_base 15: mod_base = OTHER; note = 2'-O-methyluridine-3'-phosphate
  modified_base 16: mod_base = OTHER; note = 2'-deoxy-2'-fluorouridine-3'-phosphate
  modified_base 17: mod_base = OTHER; note = 2'-O-methyladenosine-3'-phosphate
  modified_base 18: mod_base = OTHER; note = 2'-O-methyluridine-3'-phosphate
  modified_base 19: mod_base = OTHER; note = 2'-O-methyluridine-3'-phosphate
  modified_base 20: mod_base = OTHER; note = 2'-O-methyluridine-3'-phosphate
  modified_base 21: mod_base = OTHER; note = 2'-O-methyladenosine-3'-phosphorothioate
  modified_base 22: mod_base = OTHER; note = 2'-O-methyladenosine-3'-phosphorothioate
  modified_base 23: mod_base = OTHER; note = 2'-O-methyluridine
tgggtgctctatgattatttaat

SEQ ID NO: 12829 - RNA, 23 nt, synthetic construct
  source 1..23: mol_type = other RNA
  modified_base 1: mod_base = OTHER; note = 2'-O-methyluridine-3'-phosphorothioate 5'-(E)-Vinylphosphonate
  modified_base 2: mod_base = OTHER; note = 2'-deoxy-2'-fluorouridine-3'-phosphorothioate
  modified_base 3: mod_base = OTHER; note = 2'-O-methylguanosine-3'-phosphate
  modified_base 4: mod_base = OTHER; note = 2'-O-methylguanosine-3'-phosphate
  modified_base 5: mod_base = OTHER; note = 2'-O-methylguanosine-3'-phosphate
  modified_base 6: mod_base = OTHER; note = 2'-deoxy-2'-fluorouridine-3'-phosphate
  modified_base 7: mod_base = OTHER; note = 2'-O-methylguanosine-3'-phosphate
  modified_base 8: mod_base = OTHER; note = 2'-O-methylcytidine-3'-phosphate
  modified_base 9: mod_base = OTHER; note = 2'-O-methyluridine-3'-phosphate
  modified_base 10: mod_base = OTHER; note = 2'-O-methylcytidine-3'-phosphate
  modified_base 11: mod_base = OTHER; note = 2'-O-methyluridine-3'-phosphate
  modified_base 12: mod_base = OTHER; note = 2'-O-methyladenosine-3'-phosphate
  modified_base 13: mod_base = OTHER; note = 2'-O-methyluridine-3'-phosphate
  modified_base 14: mod_base = OTHER; note = 2'-deoxy-2'-fluoroguanosine-3'-phosphate
  modified_base 15: mod_base = OTHER; note = 2'-O-methyladenosine-3'-phosphate
  modified_base 16: mod_base = OTHER; note = 2'-deoxy-2'-fluorouridine-3'-phosphate
  modified_base 17: mod_base = OTHER; note = 2'-O-methyluridine-3'-phosphate
  modified_base 18: mod_base = OTHER; note = 2'-O-methyladenosine-3'-phosphate
  modified_base 19: mod_base = OTHER; note = 2'-O-methyluridine-3'-phosphate
  modified_base 20: mod_base = OTHER; note = 2'-O-methyluridine-3'-phosphate
  modified_base 21: mod_base = OTHER; note = 2'-O-methyluridine-3'-phosphorothioate
  modified_base 22: mod_base = OTHER; note = 2'-O-methyladenosine-3'-phosphorothioate
  modified_base 23: mod_base = OTHER; note = 2'-O-methyladenosine
ttgggtgctctatgattatttaa

SEQ ID NO: 12830 - RNA, 23 nt, synthetic construct
  source 1..23: mol_type = other RNA
  modified_base 1: mod_base = OTHER; note = 2'-O-methyluridine-3'-phosphorothioate 5'-(E)-Vinylphosphonate
  modified_base 2: mod_base = OTHER; note = 2'-deoxy-2'-fluoroadenosine-3'-phosphorothioate
  modified_base 3: mod_base = OTHER; note = 2'-O-methyluridine-3'-phosphate
  modified_base 4: mod_base = OTHER; note = 2'-O-methylguanosine-3'-phosphate
  modified_base 5: mod_base = OTHER; note = 2'-O-methylguanosine-3'-phosphate
  modified_base 6: mod_base = OTHER; note = 2'-deoxy-2'-fluoroguanosine-3'-phosphate
  modified_base 7: mod_base = OTHER; note = 2'-O-methyluridine-3'-phosphate
  modified_base 8: mod_base = OTHER; note = 2'-O-methylguanosine-3'-phosphate
  modified_base 9: mod_base = OTHER; note = 2'-O-methylcytidine-3'-phosphate
  modified_base 10: mod_base = OTHER; note = 2'-O-methyluridine-3'-phosphate
  modified_base 11: mod_base = OTHER; note = 2'-O-methylcytidine-3'-phosphate
  modified_base 12: mod_base = OTHER; note = 2'-O-methyluridine-3'-phosphate
  modified_base 13: mod_base = OTHER; note = 2'-O-methyladenosine-3'-phosphate
  modified_base 14: mod_base = OTHER; note = 2'-deoxy-2'-fluorouridine-3'-phosphate
  modified_base 15: mod_base = OTHER; note = 2'-O-methylguanosine-3'-phosphate
  modified_base 16: mod_base = OTHER; note = 2'-deoxy-2'-fluoroadenosine-3'-phosphate
  modified_base 17: mod_base = OTHER; note = 2'-O-methyluridine-3'-phosphate
  modified_base 18: mod_base = OTHER; note = 2'-O-methyluridine-3'-phosphate
  modified_base 19: mod_base = OTHER; note = 2'-O-methyladenosine-3'-phosphate
  modified_base 20: mod_base = OTHER; note = 2'-O-methyluridine-3'-phosphate
  modified_base 21: mod_base = OTHER; note = 2'-O-methyluridine-3'-phosphorothioate
  modified_base 22: mod_base = OTHER; note = 2'-O-methyluridine-3'-phosphorothioate
  modified_base 23: mod_base = OTHER; note = 2'-O-methyladenosine
tatgggtgctctatgattattta

SEQ ID NO: 12831 - RNA, 23 nt, synthetic construct
  source 1..23: mol_type = other RNA
  modified_base 1: mod_base = OTHER; note = 2'-O-methyluridine-3'-phosphorothioate 5'-(E)-Vinylphosphonate
  modified_base 2: mod_base = OTHER; note = 2'-deoxy-2'-fluorouridine-3'-phosphorothioate
  modified_base 3: mod_base = OTHER; note = 2'-O-methyladenosine-3'-phosphate
  modified_base 4: mod_base = OTHER; note = 2'-O-methyluridine-3'-phosphate
  modified_base 5: mod_base = OTHER; note = 2'-O-methylguanosine-3'-phosphate
  modified_base 6: mod_base = OTHER; note = 2'-deoxy-2'-fluoroguanosine-3'-phosphate
  modified_base 7: mod_base = OTHER; note = 2'-O-methylguanosine-3'-phosphate
  modified_base 8: mod_base = OTHER; note = 2'-O-methyluridine-3'-phosphate
  modified_base 9: mod_base = OTHER; note = 2'-O-methylguanosine-3'-phosphate
  modified_base 10: mod_base = OTHER; note = 2'-O-methylcytidine-3'-phosphate
  modified_base 11: mod_base = OTHER; note = 2'-O-methyluridine-3'-phosphate
  modified_base 12: mod_base = OTHER; note = 2'-O-methylcytidine-3'-phosphate
  modified_base 13: mod_base = OTHER; note = 2'-O-methyluridine-3'-phosphate
  modified_base 14: mod_base = OTHER; note = 2'-deoxy-2'-fluoroadenosine-3'-phosphate
  modified_base 15: mod_base = OTHER; note = 2'-O-methyluridine-3'-phosphate
  modified_base 16: mod_base = OTHER; note = 2'-deoxy-2'-fluoroguanosine-3'-phosphate
  modified_base 17: mod_base = OTHER; note = 2'-O-methyladenosine-3'-phosphate
  modified_base 18: mod_base = OTHER; note = 2'-O-methyluridine-3'-phosphate
  modified_base 19: mod_base = OTHER; note = 2'-O-methyluridine-3'-phosphate
  modified_base 20: mod_base = OTHER; note = 2'-O-methyladenosine-3'-phosphate
  modified_base 21: mod_base = OTHER; note = 2'-O-methyluridine-3'-phosphorothioate
  modified_base 22: mod_base = OTHER; note = 2'-O-methyluridine-3'-phosphorothioate
  modified_base 23: mod_base = OTHER; note = 2'-O-methyluridine
ttatgggtgctctatgattattt

SEQ ID NO: 12832 - RNA, 23 nt, synthetic construct
  source 1..23: mol_type = other RNA
  modified_base 1: mod_base = OTHER; note = 2'-O-methyluridine-3'-phosphorothioate 5'-(E)-Vinylphosphonate
  modified_base 2: mod_base = OTHER; note = 2'-deoxy-2'-fluoroadenosine-3'-phosphorothioate
  modified_base 3: mod_base = OTHER; note = 2'-O-methyluridine-3'-phosphate
  modified_base 4: mod_base = OTHER; note = 2'-O-methyladenosine-3'-phosphate
  modified_base 5: mod_base = OTHER; note = 2'-O-methyluridine-3'-phosphate
  modified_base 6: mod_base = OTHER; note = 2'-deoxy-2'-fluoroguanosine-3'-phosphate
  modified_base 7: mod_base = OTHER; note = 2'-O-methylguanosine-3'-phosphate
  modified_base 8: mod_base = OTHER; note = 2'-O-methylguanosine-3'-phosphate
  modified_base 9: mod_base = OTHER; note = 2'-O-methyluridine-3'-phosphate
  modified_base 10: mod_base = OTHER; note = 2'-O-methylguanosine-3'-phosphate
  modified_base 11: mod_base = OTHER; note = 2'-O-methylcytidine-3'-phosphate
  modified_base 12: mod_base = OTHER; note = 2'-O-methyluridine-3'-phosphate
  modified_base 13: mod_base = OTHER; note = 2'-O-methylcytidine-3'-phosphate
  modified_base 14: mod_base = OTHER; note = 2'-deoxy-2'-fluorouridine-3'-phosphate
  modified_base 15: mod_base = OTHER; note = 2'-O-methyladenosine-3'-phosphate
  modified_base 16: mod_base = OTHER; note = 2'-deoxy-2'-fluorouridine-3'-phosphate
  modified_base 17: mod_base = OTHER; note = 2'-O-methylguanosine-3'-phosphate
  modified_base 18: mod_base = OTHER; note = 2'-O-methyladenosine-3'-phosphate
  modified_base 19: mod_base = OTHER; note = 2'-O-methyluridine-3'-phosphate
  modified_base 20: mod_base = OTHER; note = 2'-O-methyluridine-3'-phosphate
  modified_base 21: mod_base = OTHER; note = 2'-O-methyladenosine-3'-phosphorothioate
  modified_base 22: mod_base = OTHER; note = 2'-O-methyluridine-3'-phosphorothioate
  modified_base 23: mod_base = OTHER; note = 2'-O-methyluridine
tatatgggtgctctatgattatt

SEQ ID NO: 12833 - RNA, 23 nt, synthetic construct
  source 1..23: mol_type = other RNA
  modified_base 1: mod_base = OTHER; note = 2'-O-methyluridine-3'-phosphorothioate 5'-(E)-Vinylphosphonate
  modified_base 2: mod_base = OTHER; note = 2'-deoxy-2'-fluorocytidine-3'-phosphorothioate
  modified_base 3: mod_base = OTHER; note = 2'-O-methyladenosine-3'-phosphate
  modified_base 4: mod_base = OTHER; note = 2'-O-methyladenosine-3'-phosphate
  modified_base 5: mod_base = OTHER; note = 2'-O-methylguanosine-3'-phosphate
  modified_base 6: mod_base = OTHER; note = 2'-deoxy-2'-fluorocytidine-3'-phosphate
  modified_base 7: mod_base = OTHER; note = 2'-O-methyladenosine-3'-phosphate
  modified_base 8: mod_base = OTHER; note = 2'-O-methyladenosine-3'-phosphate
  modified_base 9: mod_base = OTHER; note = 2'-O-methylguanosine-3'-phosphate
  modified_base 10: mod_base = OTHER; note = 2'-O-methyladenosine-3'-phosphate
  modified_base 11: mod_base = OTHER; note = 2'-O-methyluridine-3'-phosphate
  modified_base 12: mod_base = OTHER; note = 2'-O-methyladenosine-3'-phosphate
  modified_base 13: mod_base = OTHER; note = 2'-O-methyluridine-3'-phosphate
  modified_base 14: mod_base = OTHER; note = 2'-deoxy-2'-fluoroguanosine-3'-phosphate
  modified_base 15: mod_base = OTHER; note = 2'-O-methylguanosine-3'-phosphate
  modified_base 16: mod_base = OTHER; note = 2'-deoxy-2'-fluoroguanosine-3'-phosphate
  modified_base 17: mod_base = OTHER; note = 2'-O-methyluridine-3'-phosphate
  modified_base 18: mod_base = OTHER; note = 2'-O-methylguanosine-3'-phosphate
  modified_base 19: mod_base = OTHER; note = 2'-O-methylcytidine-3'-phosphate
  modified_base 20: mod_base = OTHER; note = 2'-O-methyluridine-3'-phosphate
  modified_base 21: mod_base = OTHER; note = 2'-O-methylcytidine-3'-phosphorothioate
  modified_base 22: mod_base = OTHER; note = 2'-O-methyluridine-3'-phosphorothioate
  modified_base 23: mod_base = OTHER; note = 2'-O-methyladenosine
tcaagcaagatatgggtgctcta

SEQ ID NO: 12834 - RNA, 23 nt, synthetic construct
  source 1..23: mol_type = other RNA
  modified_base 1: mod_base = OTHER; note = 2'-O-methyluridine-3'-phosphorothioate 5'-(E)-Vinylphosphonate
  modified_base 2: mod_base = OTHER; note = 2'-deoxy-2'-fluorouridine-3'-phosphorothioate
  modified_base 3: mod_base = OTHER; note = 2'-O-methyladenosine-3'-phosphate
  modified_base 4: mod_base = OTHER; note = 2'-O-methyluridine-3'-phosphate
  modified_base 5: mod_base = OTHER; note = 2'-O-methyluridine-3'-phosphate
  modified_base 6: mod_base = OTHER; note = 2'-deoxy-2'-fluoroguanosine-3'-phosphate
  modified_base 7: mod_base = OTHER; note = 2'-O-methyluridine-3'-phosphate
  modified_base 8: mod_base = OTHER; note = 2'-O-methylguanosine-3'-phosphate
  modified_base 9: mod_base = OTHER; note = 2'-O-methylguanosine-3'-phosphate
  modified_base 10: mod_base = OTHER; note = 2'-O-methylcytidine-3'-phosphate
  modified_base 11: mod_base = OTHER; note = 2'-O-methyladenosine-3'-phosphate
  modified_base 12: mod_base = OTHER; note = 2'-O-methyladenosine-3'-phosphate
  modified_base 13: mod_base = OTHER; note = 2'-O-methylguanosine-3'-phosphate
  modified_base 14: mod_base = OTHER; note = 2'-deoxy-2'-fluorocytidine-3'-phosphate
  modified_base 15: mod_base = OTHER; note = 2'-O-methyladenosine-3'-phosphate
  modified_base 16: mod_base = OTHER; note = 2'-deoxy-2'-fluoroadenosine-3'-phosphate
  modified_base 17: mod_base = OTHER; note = 2'-O-methylguanosine-3'-phosphate
  modified_base 18: mod_base = OTHER; note = 2'-O-methyladenosine-3'-phosphate
  modified_base 19: mod_base = OTHER; note = 2'-O-methyluridine-3'-phosphate
  modified_base 20: mod_base = OTHER; note = 2'-O-methyladenosine-3'-phosphate
  modified_base 21: mod_base = OTHER; note = 2'-O-methyluridine-3'-phosphorothioate
  modified_base 22: mod_base = OTHER; note = 2'-O-methylguanosine-3'-phosphorothioate
  modified_base 23: mod_base = OTHER; note = 2'-O-methylguanosine
ttattgtggcaagcaagatatgg

SEQ ID NO: 12835 - RNA, 23 nt, synthetic construct
  source 1..23: mol_type = other RNA
  modified_base 1: mod_base = OTHER; note = 2'-O-methyluridine-3'-phosphorothioate 5'-(E)-Vinylphosphonate
  modified_base 2: mod_base = OTHER; note = 2'-deoxy-2'-fluorouridine-3'-phosphorothioate
  modified_base 3: mod_base = OTHER; note = 2'-O-methylcytidine-3'-phosphate
  modified_base 4: mod_base = OTHER; note = 2'-O-methylcytidine-3'-phosphate
  modified_base 5: mod_base = OTHER; note = 2'-O-methylcytidine-3'-phosphate
  modified_base 6: mod_base = OTHER; note = 2'-deoxy-2'-fluorouridine-3'-phosphate
  modified_base 7: mod_base = OTHER; note = 2'-O-methylguanosine-3'-phosphate
  modified_base 8: mod_base = OTHER; note = 2'-O-methyladenosine-3'-phosphate
  modified_base 9: mod_base = OTHER; note = 2'-O-methylguanosine-3'-phosphate
  modified_base 10: mod_base = OTHER; note = 2'-O-methylguanosine-3'-phosphate
  modified_base 11: mod_base = OTHER; note = 2'-O-methylguanosine-3'-phosphate
  modified_base 12: mod_base = OTHER; note = 2'-O-methylcytidine-3'-phosphate
  modified_base 13: mod_base = OTHER; note = 2'-O-methyladenosine-3'-phosphate
  modified_base 14: mod_base = OTHER; note = 2'-deoxy-2'-fluoroguanosine-3'-phosphate
  modified_base 15: mod_base = OTHER; note = 2'-O-methylguanosine-3'-phosphate
  modified_base 16: mod_base = OTHER; note = 2'-deoxy-2'-fluoroadenosine-3'-phosphate
  modified_base 17: mod_base = OTHER; note = 2'-O-methylcytidine-3'-phosphate
  modified_base 18: mod_base = OTHER; note = 2'-O-methylcytidine-3'-phosphate
  modified_base 19: mod_base = OTHER; note = 2'-O-methyluridine-3'-phosphate
  modified_base 20: mod_base = OTHER; note = 2'-O-methyladenosine-3'-phosphate
  modified_base 21: mod_base = OTHER; note = 2'-O-methyluridine-3'-phosphorothioate
  modified_base 22: mod_base = OTHER; note = 2'-O-methylcytidine-3'-phosphorothioate
  modified_base 23: mod_base = OTHER; note = 2'-O-methyluridine
ttccctgagggcaggacctatct

SEQ ID NO: 12836 - RNA, 23 nt, synthetic construct
  source 1..23: mol_type = other RNA
  modified_base 1: mod_base = OTHER; note = 2'-O-methyluridine-3'-phosphorothioate 5'-(E)-Vinylphosphonate
  modified_base 2: mod_base = OTHER; note = 2'-deoxy-2'-fluoroadenosine-3'-phosphorothioate
  modified_base 3: mod_base = OTHER; note = 2'-O-methyluridine-3'-phosphate
  modified_base 4: mod_base = OTHER; note = 2'-O-methylcytidine-3'-phosphate
  modified_base 5: mod_base = OTHER; note = 2'-O-methylcytidine-3'-phosphate
  modified_base 6: mod_base = OTHER; note = 2'-deoxy-2'-fluorocytidine-3'-phosphate
  modified_base 7: mod_base = OTHER; note = 2'-O-methyluridine-3'-phosphate
  modified_base 8: mod_base = OTHER; note = 2'-O-methylguanosine-3'-phosphate
  modified_base 9: mod_base = OTHER; note = 2'-O-methyladenosine-3'-phosphate
  modified_base 10: mod_base = OTHER; note = 2'-O-methylguanosine-3'-phosphate
  modified_base 11: mod_base = OTHER; note = 2'-O-methylguanosine-3'-phosphate
  modified_base 12: mod_base = OTHER; note = 2'-O-methylguanosine-3'-phosphate
  modified_base 13: mod_base = OTHER; note = 2'-O-methylcytidine-3'-phosphate
  modified_base 14: mod_base = OTHER; note = 2'-deoxy-2'-fluoroadenosine-3'-phosphate
  modified_base 15: mod_base = OTHER; note = 2'-O-methylguanosine-3'-phosphate
  modified_base 16: mod_base = OTHER; note = 2'-deoxy-2'-fluoroguanosine-3'-phosphate
  modified_base 17: mod_base = OTHER; note = 2'-O-methyladenosine-3'-phosphate
  modified_base 18: mod_base = OTHER; note = 2'-O-methylcytidine-3'-phosphate
  modified_base 19: mod_base = OTHER; note = 2'-O-methylcytidine-3'-phosphate
  modified_base 20: mod_base = OTHER; note = 2'-O-methyluridine-3'-phosphate
  modified_base 21: mod_base = OTHER; note = 2'-O-methyladenosine-3'-phosphorothioate
  modified_base 22: mod_base = OTHER; note = 2'-O-methyluridine-3'-phosphorothioate
  modified_base 23: mod_base = OTHER; note = 2'-O-methylcytidine
tatccctgagggcaggacctatc

SEQ ID NO: 12837 - RNA, 23 nt, synthetic construct
  source 1..23: mol_type = other RNA
  modified_base 1: mod_base = OTHER; note = 2'-O-methyluridine-3'-phosphorothioate 5'-(E)-Vinylphosphonate
  modified_base 2: mod_base = OTHER; note = 2'-deoxy-2'-fluoroadenosine-3'-phosphorothioate
  modified_base 3: mod_base = OTHER; note = 2'-O-methyladenosine-3'-phosphate
  modified_base 4: mod_base = OTHER; note = 2'-O-methyluridine-3'-phosphate
  modified_base 5: mod_base = OTHER; note = 2'-O-methylcytidine-3'-phosphate
  modified_base 6: mod_base = OTHER; note = 2'-deoxy-2'-fluorocytidine-3'-phosphate
  modified_base 7: mod_base = OTHER; note = 2'-O-methylcytidine-3'-phosphate
  modified_base 8: mod_base = OTHER; note = 2'-O-methyluridine-3'-phosphate
  modified_base 9: mod_base = OTHER; note = 2'-O-methylguanosine-3'-phosphate
  modified_base 10: mod_base = OTHER; note = 2'-O-methyladenosine-3'-phosphate
  modified_base 11: mod_base = OTHER; note = 2'-O-methylguanosine-3'-phosphate
  modified_base 12: mod_base = OTHER; note = 2'-O-methylguanosine-3'-phosphate
  modified_base 13: mod_base = OTHER; note = 2'-O-methylguanosine-3'-phosphate
  modified_base 14: mod_base = OTHER; note = 2'-deoxy-2'-fluorocytidine-3'-phosphate
  modified_base 15: mod_base = OTHER; note = 2'-O-methyladenosine-3'-phosphate
  modified_base 16: mod_base = OTHER; note = 2'-deoxy-2'-fluoroguanosine-3'-phosphate
  modified_base 17: mod_base = OTHER; note = 2'-O-methylguanosine-3'-phosphate
  modified_base 18: mod_base = OTHER; note = 2'-O-methyladenosine-3'-phosphate
  modified_base 19: mod_base = OTHER; note = 2'-O-methylcytidine-3'-phosphate
  modified_base 20: mod_base = OTHER; note = 2'-O-methylcytidine-3'-phosphate
  modified_base 21: mod_base = OTHER; note = 2'-O-methyluridine-3'-phosphorothioate
  modified_base 22: mod_base = OTHER; note = 2'-O-methyladenosine-3'-phosphorothioate
  modified_base 23: mod_base = OTHER; note = 2'-O-methyluridine
taatccctgagggcaggacctat

SEQ ID NO: 12838 - RNA, 23 nt, synthetic construct
  source 1..23: mol_type = other RNA
  modified_base 1: mod_base = OTHER; note = 2'-O-methyluridine-3'-phosphorothioate 5'-(E)-Vinylphosphonate
  modified_base 2: mod_base = OTHER; note = 2'-deoxy-2'-fluoroadenosine-3'-phosphorothioate
  modified_base 3: mod_base = OTHER; note = 2'-O-methyladenosine-3'-phosphate
  modified_base 4: mod_base = OTHER; note = 2'-O-methyladenosine-3'-phosphate
  modified_base 5: mod_base = OTHER; note = 2'-O-methyluridine-3'-phosphate
  modified_base 6: mod_base = OTHER; note = 2'-deoxy-2'-fluorocytidine-3'-phosphate
  modified_base 7: mod_base = OTHER; note = 2'-O-methylcytidine-3'-phosphate
  modified_base 8: mod_base = OTHER; note = 2'-O-methylcytidine-3'-phosphate
  modified_base 9: mod_base = OTHER; note = 2'-O-methyluridine-3'-phosphate
  modified_base 10: mod_base = OTHER; note = 2'-O-methylguanosine-3'-phosphate
  modified_base 11: mod_base = OTHER; note = 2'-O-methyladenosine-3'-phosphate
  modified_base 12: mod_base = OTHER; note = 2'-O-methylguanosine-3'-phosphate
  modified_base 13: mod_base = OTHER; note = 2'-O-methylguanosine-3'-phosphate
  modified_base 14: mod_base = OTHER; note = 2'-deoxy-2'-fluoroguanosine-3'-phosphate
  modified_base 15: mod_base = OTHER; note = 2'-O-methylcytidine-3'-phosphate
  modified_base 16: mod_base = OTHER; note = 2'-deoxy-2'-fluoroadenosine-3'-phosphate
  modified_base 17: mod_base = OTHER; note = 2'-O-methylguanosine-3'-phosphate
  modified_base 18: mod_base = OTHER; note = 2'-O-methylguanosine-3'-phosphate
  modified_base 19: mod_base = OTHER; note = 2'-O-methyladenosine-3'-phosphate
  modified_base 20: mod_base = OTHER; note = 2'-O-methylcytidine-3'-phosphate
  modified_base 21: mod_base = OTHER; note = 2'-O-methylcytidine-3'-phosphorothioate
  modified_base 22: mod_base = OTHER; note = 2'-O-methyluridine-3'-phosphorothioate
  modified_base 23: mod_base = OTHER; note = 2'-O-methyladenosine
taaatccctgagggcaggaccta

SEQ ID NO: 12839 - RNA, 23 nt, synthetic construct
  source 1..23: mol_type = other RNA
  modified_base 1: mod_base = OTHER; note = 2'-O-methyluridine-3'-phosphorothioate 5'-(E)-Vinylphosphonate
  modified_base 2: mod_base = OTHER; note = 2'-deoxy-2'-fluoroadenosine-3'-phosphorothioate
  modified_base 3: mod_base = OTHER; note = 2'-O-methyladenosine-3'-phosphate
  modified_base 4: mod_base = OTHER; note = 2'-O-methyladenosine-3'-phosphate
  modified_base 5: mod_base = OTHER; note = 2'-O-methyladenosine-3'-phosphate
  modified_base 6: mod_base = OTHER; note = 2'-deoxy-2'-fluorouridine-3'-phosphate
  modified_base 7: mod_base = OTHER; note = 2'-O-methylcytidine-3'-phosphate
  modified_base 8: mod_base = OTHER; note = 2'-O-methylcytidine-3'-phosphate
  modified_base 9: mod_base = OTHER; note = 2'-O-methylcytidine-3'-phosphate
  modified_base 10: mod_base = OTHER; note = 2'-O-methyluridine-3'-phosphate
  modified_base 11: mod_base = OTHER; note = 2'-O-methylguanosine-3'-phosphate
  modified_base 12: mod_base = OTHER; note = 2'-O-methyladenosine-3'-phosphate
  modified_base 13: mod_base = OTHER; note = 2'-O-methylguanosine-3'-phosphate
  modified_base 14: mod_base = OTHER; note = 2'-deoxy-2'-fluoroguanosine-3'-phosphate
  modified_base 15: mod_base = OTHER; note = 2'-O-methylguanosine-3'-phosphate
  modified_base 16: mod_base = OTHER; note = 2'-deoxy-2'-fluorocytidine-3'-phosphate
  modified_base 17: mod_base = OTHER; note = 2'-O-methyladenosine-3'-phosphate
  modified_base 18: mod_base = OTHER; note = 2'-O-methylguanosine-3'-phosphate
  modified_base 19: mod_base = OTHER; note = 2'-O-methylguanosine-3'-phosphate
  modified_base 20: mod_base = OTHER; note = 2'-O-methyladenosine-3'-phosphate
  modified_base 21: mod_base = OTHER; note = 2'-O-methylcytidine-3'-phosphorothioate
  modified_base 22: mod_base = OTHER; note = 2'-O-methylcytidine-3'-phosphorothioate
  modified_base 23: mod_base = OTHER; note = 2'-O-methyluridine
taaaatccctgagggcaggacct

SEQ ID NO: 12840 - RNA, 23 nt, synthetic construct
  source 1..23: mol_type = other RNA
  modified_base 1: mod_base = OTHER; note = 2'-O-methyluridine-3'-phosphorothioate 5'-(E)-Vinylphosphonate
  modified_base 2: mod_base = OTHER; note = 2'-deoxy-2'-fluorouridine-3'-phosphorothioate
  modified_base 3: mod_base = OTHER; note = 2'-O-methyladenosine-3'-phosphate
  modified_base 4: mod_base = OTHER; note = 2'-O-methyladenosine-3'-phosphate
  modified_base 5: mod_base = OTHER; note = 2'-O-methyladenosine-3'-phosphate
  modified_base 6: mod_base = OTHER; note = 2'-deoxy-2'-fluoroadenosine-3'-phosphate
  modified_base 7: mod_base = OTHER; note = 2'-O-methyluridine-3'-phosphate
  modified_base 8: mod_base = OTHER; note = 2'-O-methylcytidine-3'-phosphate
  modified_base 9: mod_base = OTHER; note = 2'-O-methylcytidine-3'-phosphate
  modified_base 10: mod_base = OTHER; note = 2'-O-methylcytidine-3'-phosphate
  modified_base 11: mod_base = OTHER; note = 2'-O-methyluridine-3'-phosphate
  modified_base 12: mod_base = OTHER; note = 2'-O-methylguanosine-3'-phosphate
  modified_base 13: mod_base = OTHER; note = 2'-O-methyladenosine-3'-phosphate
  modified_base 14: mod_base = OTHER; note = 2'-deoxy-2'-fluoroguanosine-3'-phosphate
  modified_base 15: mod_base = OTHER; note = 2'-O-methylguanosine-3'-phosphate
  modified_base 16: mod_base = OTHER; note = 2'-deoxy-2'-fluoroguanosine-3'-phosphate
  modified_base 17: mod_base = OTHER; note = 2'-O-methylcytidine-3'-phosphate
  modified_base 18: mod_base = OTHER; note = 2'-O-methyladenosine-3'-phosphate
  modified_base 19: mod_base = OTHER; note = 2'-O-methylguanosine-3'-phosphate
  modified_base 20: mod_base = OTHER; note = 2'-O-methylguanosine-3'-phosphate
  modified_base 21: mod_base = OTHER; note = 2'-O-methyladenosine-3'-phosphorothioate
  modified_base 22: mod_base = OTHER; note = 2'-O-methylcytidine-3'-phosphorothioate
  modified_base 23: mod_base = OTHER; note = 2'-O-methylcytidine
ttaaaatccctgagggcaggacc

SEQ ID NO: 12841 - RNA, 23 nt, synthetic construct
  source 1..23: mol_type = other RNA
  modified_base 1: mod_base = OTHER; note = 2'-O-methyluridine-3'-phosphorothioate 5'-(E)-Vinylphosphonate
  modified_base 2: mod_base = OTHER; note = 2'-deoxy-2'-fluorouridine-3'-phosphorothioate
  modified_base 3: mod_base = OTHER; note = 2'-O-methyluridine-3'-phosphate
  modified_base 4: mod_base = OTHER; note = 2'-O-methyladenosine-3'-phosphate
  modified_base 5: mod_base = OTHER; note = 2'-O-methyladenosine-3'-phosphate
  modified_base 6: mod_base = OTHER; note = 2'-deoxy-2'-fluoroadenosine-3'-phosphate
  modified_base 7: mod_base = OTHER; note = 2'-O-methyladenosine-3'-phosphate
  modified_base 8: mod_base = OTHER; note = 2'-O-methyluridine-3'-phosphate
  modified_base 9: mod_base = OTHER; note = 2'-O-methylcytidine-3'-phosphate
  modified_base 10: mod_base = OTHER; note = 2'-O-methylcytidine-3'-phosphate
  modified_base 11: mod_base = OTHER; note = 2'-O-methylcytidine-3'-phosphate
  modified_base 12: mod_base = OTHER; note = 2'-O-methyluridine-3'-phosphate
  modified_base 13: mod_base = OTHER; note = 2'-O-methylguanosine-3'-phosphate
  modified_base 14: mod_base = OTHER; note = 2'-deoxy-2'-fluoroadenosine-3'-phosphate
  modified_base 15: mod_base = OTHER; note = 2'-O-methylguanosine-3'-phosphate
  modified_base 16: mod_base = OTHER; note = 2'-deoxy-2'-fluoroguanosine-3'-phosphate
  modified_base 17: mod_base = OTHER; note = 2'-O-methylguanosine-3'-phosphate
  modified_base 18: mod_base = OTHER; note = 2'-O-methylcytidine-3'-phosphate
  modified_base 19: mod_base = OTHER; note = 2'-O-methyladenosine-3'-phosphate
  modified_base 20: mod_base = OTHER; note = 2'-O-methylguanosine-3'-phosphate
  modified_base 21: mod_base = OTHER; note = 2'-O-methylguanosine-3'-phosphorothioate
  modified_base 22: mod_base = OTHER; note = 2'-O-methyladenosine-3'-phosphorothioate
  modified_base 23: mod_base = OTHER; note = 2'-O-methylcytidine
tttaaaatccctgagggcaggac

SEQ ID NO: 12842 - RNA, 23 nt, synthetic construct
  source 1..23: mol_type = other RNA
  modified_base 1: mod_base = OTHER; note = 2'-O-methyluridine-3'-phosphorothioate 5'-(E)-Vinylphosphonate
  modified_base 2: mod_base = OTHER; note = 2'-deoxy-2'-fluorouridine-3'-phosphorothioate
  modified_base 3: mod_base = OTHER; note = 2'-O-methyluridine-3'-phosphate
  modified_base 4: mod_base = OTHER; note = 2'-O-methyluridine-3'-phosphate
  modified_base 5: mod_base = OTHER; note = 2'-O-methyladenosine-3'-phosphate
  modified_base 6: mod_base = OTHER; note = 2'-deoxy-2'-fluoroadenosine-3'-phosphate
  modified_base 7: mod_base = OTHER; note = 2'-O-methyladenosine-3'-phosphate
  modified_base 8: mod_base = OTHER; note = 2'-O-methyladenosine-3'-phosphate
  modified_base 9: mod_base = OTHER; note = 2'-O-methyluridine-3'-phosphate
  modified_base 10: mod_base = OTHER; note = 2'-O-methylcytidine-3'-phosphate
  modified_base 11: mod_base = OTHER; note = 2'-O-methylcytidine-3'-phosphate
  modified_base 12: mod_base = OTHER; note = 2'-O-methylcytidine-3'-phosphate
  modified_base 13: mod_base = OTHER; note = 2'-O-methyluridine-3'-phosphate
  modified_base 14: mod_base = OTHER; note = 2'-deoxy-2'-fluoroguanosine-3'-phosphate
  modified_base 15: mod_base = OTHER; note = 2'-O-methyladenosine-3'-phosphate
  modified_base 16: mod_base = OTHER; note = 2'-deoxy-2'-fluoroguanosine-3'-phosphate
  modified_base 17: mod_base = OTHER; note = 2'-O-methylguanosine-3'-phosphate
  modified_base 18: mod_base = OTHER; note = 2'-O-methylguanosine-3'-phosphate
  modified_base 19: mod_base = OTHER; note = 2'-O-methylcytidine-3'-phosphate
  modified_base 20: mod_base = OTHER; note = 2'-O-methyladenosine-3'-phosphate
  modified_base 21: mod_base = OTHER; note = 2'-O-methylguanosine-3'-phosphorothioate
  modified_base 22: mod_base = OTHER; note = 2'-O-methylguanosine-3'-phosphorothioate
  modified_base 23: mod_base = OTHER; note = 2'-O-methyladenosine
ttttaaaatccctgagggcagga

SEQ ID NO: 12843 - RNA, 23 nt, synthetic construct
  source 1..23: mol_type = other RNA
  modified_base 1: mod_base = OTHER; note = 2'-O-methyluridine-3'-phosphorothioate 5'-(E)-Vinylphosphonate
  modified_base 2: mod_base = OTHER; note = 2'-deoxy-2'-fluorocytidine-3'-phosphorothioate
  modified_base 3: mod_base = OTHER; note = 2'-O-methyluridine-3'-phosphate
  modified_base 4: mod_base = OTHER; note = 2'-O-methyluridine-3'-phosphate
  modified_base 5: mod_base = OTHER; note = 2'-O-methyluridine-3'-phosphate
  modified_base 6: mod_base = OTHER; note = 2'-deoxy-2'-fluoroadenosine-3'-phosphate
  modified_base 7: mod_base = OTHER; note = 2'-O-methyladenosine-3'-phosphate
  modified_base 8: mod_base = OTHER; note = 2'-O-methyladenosine-3'-phosphate
  modified_base 9: mod_base = OTHER; note = 2'-O-methyladenosine-3'-phosphate
  modified_base 10: mod_base = OTHER; note = 2'-O-methyluridine-3'-phosphate
  modified_base 11: mod_base = OTHER; note = 2'-O-methylcytidine-3'-phosphate
  modified_base 12: mod_base = OTHER; note = 2'-O-methylcytidine-3'-phosphate
  modified_base 13: mod_base = OTHER; note = 2'-O-methylcytidine-3'-phosphate
  modified_base 14: mod_base = OTHER; note = 2'-deoxy-2'-fluorouridine-3'-phosphate
  modified_base 15: mod_base = OTHER; note = 2'-O-methylguanosine-3'-phosphate
  modified_base 16: mod_base = OTHER; note = 2'-deoxy-2'-fluoroadenosine-3'-phosphate
  modified_base 17: mod_base = OTHER; note = 2'-O-methylguanosine-3'-phosphate
  modified_base 18: mod_base = OTHER; note = 2'-O-methylguanosine-3'-phosphate
  modified_base 19: mod_base = OTHER; note = 2'-O-methylguanosine-3'-phosphate
  modified_base 20: mod_base = OTHER; note = 2'-O-methylcytidine-3'-phosphate
  modified_base 21: mod_base = OTHER; note = 2'-O-methyladenosine-3'-phosphorothioate
  modified_base 22: mod_base = OTHER; note = 2'-O-methylguanosine-3'-phosphorothioate
  modified_base 23: mod_base = OTHER; note = 2'-O-methylguanosine
tctttaaaatccctgagggcagg

SEQ ID NO: 12844 - RNA, 23 nt, synthetic construct
  source 1..23: mol_type = other RNA
  modified_base 1: mod_base = OTHER; note = 2'-O-methyluridine-3'-phosphorothioate 5'-(E)-Vinylphosphonate
  modified_base 2: mod_base = OTHER; note = 2'-deoxy-2'-fluoroadenosine-3'-phosphorothioate
  modified_base 3: mod_base = OTHER; note = 2'-O-methylcytidine-3'-phosphate
  modified_base 4: mod_base = OTHER; note = 2'-O-methyluridine-3'-phosphate
  modified_base 5: mod_base = OTHER; note = 2'-O-methyluridine-3'-phosphate
  modified_base 6: mod_base = OTHER; note = 2'-deoxy-2'-fluorouridine-3'-phosphate
  modified_base 7: mod_base = OTHER; note = 2'-O-methyladenosine-3'-phosphate
  modified_base 8: mod_base = OTHER; note = 2'-O-methyladenosine-3'-phosphate
  modified_base 9: mod_base = OTHER; note = 2'-O-methyladenosine-3'-phosphate
  modified_base 10: mod_base = OTHER; note = 2'-O-methyladenosine-3'-phosphate
  modified_base 11: mod_base = OTHER; note = 2'-O-methyluridine-3'-phosphate
  modified_base 12: mod_base = OTHER; note = 2'-O-methylcytidine-3'-phosphate
  modified_base 13: mod_base = OTHER; note = 2'-O-methylcytidine-3'-phosphate
  modified_base 14: mod_base = OTHER; note = 2'-deoxy-2'-fluorocytidine-3'-phosphate
  modified_base 15: mod_base = OTHER; note = 2'-O-methyluridine-3'-phosphate
  modified_base 16: mod_base = OTHER; note = 2'-deoxy-2'-fluoroguanosine-3'-phosphate
  modified_base 17: mod_base = OTHER; note = 2'-O-methyladenosine-3'-phosphate
  modified_base 18: mod_base = OTHER; note = 2'-O-methylguanosine-3'-phosphate
  modified_base 19: mod_base = OTHER; note = 2'-O-methylguanosine-3'-phosphate
  modified_base 20: mod_base = OTHER; note = 2'-O-methylguanosine-3'-phosphate
  modified_base 21: mod_base = OTHER; note = 2'-O-methylcytidine-3'-phosphorothioate
  modified_base 22: mod_base = OTHER; note = 2'-O-methyladenosine-3'-phosphorothioate
  modified_base 23: mod_base = OTHER; note = 2'-O-methylguanosine
tactttaaaatccctgagggcag

SEQ ID NO: 12845 - RNA, 23 nt, synthetic construct
  source 1..23: mol_type = other RNA
  modified_base 1: mod_base = OTHER; note = 2'-O-methyluridine-3'-phosphorothioate 5'-(E)-Vinylphosphonate
  modified_base 2: mod_base = OTHER; note = 2'-deoxy-2'-fluoroguanosine-3'-phosphorothioate
  modified_base 3: mod_base = OTHER; note = 2'-O-methyladenosine-3'-phosphate
  modified_base 4: mod_base = OTHER; note = 2'-O-methylcytidine-3'-phosphate
  modified_base 5: mod_base = OTHER; note = 2'-O-methyluridine-3'-phosphate
  modified_base 6: mod_base = OTHER; note = 2'-deoxy-2'-fluorouridine-3'-phosphate
  modified_base 7: mod_base = OTHER; note = 2'-O-methyluridine-3'-phosphate
  modified_base 8: mod_base = OTHER; note = 2'-O-methyladenosine-3'-phosphate
  modified_base 9: mod_base = OTHER; note = 2'-O-methyladenosine-3'-phosphate
  modified_base 10: mod_base = OTHER; note = 2'-O-methyladenosine-3'-phosphate
  modified_base 11: mod_base = OTHER; note = 2'-O-methyladenosine-3'-phosphate
  modified_base 12: mod_base = OTHER; note = 2'-O-methyluridine-3'-phosphate
  modified_base 13: mod_base = OTHER; note = 2'-O-methylcytidine-3'-phosphate
  modified_base 14: mod_base = OTHER; note = 2'-deoxy-2'-fluorocytidine-3'-phosphate
  modified_base 15: mod_base = OTHER; note = 2'-O-methylcytidine-3'-phosphate
  modified_base 16: mod_base = OTHER; note = 2'-deoxy-2'-fluorouridine-3'-phosphate
  modified_base 17: mod_base = OTHER; note = 2'-O-methylguanosine-3'-phosphate
  modified_base 18: mod_base = OTHER; note = 2'-O-methyladenosine-3'-phosphate
  modified_base 19: mod_base = OTHER; note = 2'-O-methylguanosine-3'-phosphate
  modified_base 20: mod_base = OTHER; note = 2'-O-methylguanosine-3'-phosphate
  modified_base 21: mod_base = OTHER; note = 2'-O-methylguanosine-3'-phosphorothioate
  modified_base 22: mod_base = OTHER; note = 2'-O-methylcytidine-3'-phosphorothioate
  modified_base 23: mod_base = OTHER; note = 2'-O-methyladenosine
tgactttaaaatccctgagggca

SEQ ID NO: 12846 - RNA, 23 nt, synthetic construct
  source 1..23: mol_type = other RNA
  modified_base 1: mod_base = OTHER; note = 2'-O-methyluridine-3'-phosphorothioate 5'-(E)-Vinylphosphonate
  modified_base 2: mod_base = OTHER; note = 2'-deoxy-2'-fluoroadenosine-3'-phosphorothioate
  modified_base 3: mod_base = OTHER; note = 2'-O-methyladenosine-3'-phosphate
  modified_base 4: mod_base = OTHER; note = 2'-O-methyluridine-3'-phosphate
  modified_base 5: mod_base = OTHER; note = 2'-O-methyluridine-3'-phosphate
  modified_base 6: mod_base = OTHER; note = 2'-deoxy-2'-fluoroadenosine-3'-phosphate
  modified_base 7: mod_base = OTHER; note = 2'-O-methylguanosine-3'-phosphate
  modified_base 8: mod_base = OTHER; note = 2'-O-methyladenosine-3'-phosphate
  modified_base 9: mod_base = OTHER; note = 2'-O-methylcytidine-3'-phosphate
  modified_base 10: mod_base = OTHER; note = 2'-O-methyluridine-3'-phosphate
  modified_base 11: mod_base = OTHER; note = 2'-O-methyluridine-3'-phosphate
  modified_base 12: mod_base = OTHER; note = 2'-O-methyluridine-3'-phosphate
  modified_base 13: mod_base = OTHER; note = 2'-O-methyladenosine-3'-phosphate
  modified_base 14: mod_base = OTHER; note = 2'-deoxy-2'-fluoroadenosine-3'-phosphate
  modified_base 15: mod_base = OTHER; note = 2'-O-methyladenosine-3'-phosphate
  modified_base 16: mod_base = OTHER; note = 2'-deoxy-2'-fluoroadenosine-3'-phosphate
  modified_base 17: mod_base = OTHER; note = 2'-O-methyluridine-3'-phosphate
  modified_base 18: mod_base = OTHER; note = 2'-O-methylcytidine-3'-phosphate
  modified_base 19: mod_base = OTHER; note = 2'-O-methylcytidine-3'-phosphate
  modified_base 20: mod_base = OTHER; note = 2'-O-methylcytidine-3'-phosphate
  modified_base 21: mod_base = OTHER; note = 2'-O-methyluridine-3'-phosphorothioate
  modified_base 22: mod_base = OTHER; note = 2'-O-methylguanosine-3'-phosphorothioate
  modified_base 23: mod_base = OTHER; note = 2'-O-methyladenosine
taattagactttaaaatccctga

SEQ ID NO: 12847 - RNA, 23 nt, synthetic construct
  source 1..23: mol_type = other RNA
  modified_base 1: mod_base = OTHER; note = 2'-O-methyluridine-3'-phosphorothioate 5'-(E)-Vinylphosphonate
  modified_base 2: mod_base = OTHER; note = 2'-deoxy-2'-fluoroadenosine-3'-phosphorothioate
  modified_base 3: mod_base = OTHER; note = 2'-O-methyladenosine-3'-phosphate
  modified_base 4: mod_base = OTHER; note = 2'-O-methyladenosine-3'-phosphate
  modified_base 5: mod_base = OTHER; note = 2'-O-methyluridine-3'-phosphate
  modified_base 6: mod_base = OTHER; note = 2'-deoxy-2'-fluorouridine-3'-phosphate
  modified_base 7: mod_base = OTHER; note = 2'-O-methyladenosine-3'-phosphate
  modified_base 8: mod_base = OTHER; note = 2'-O-methylguanosine-3'-phosphate
  modified_base 9: mod_base = OTHER; note = 2'-O-methyladenosine-3'-phosphate
  modified_base 10: mod_base = OTHER; note = 2'-O-methylcytidine-3'-phosphate
  modified_base 11: mod_base = OTHER; note = 2'-O-methyluridine-3'-phosphate
  modified_base 12: mod_base = OTHER; note = 2'-O-methyluridine-3'-phosphate
  modified_base 13: mod_base = OTHER; note = 2'-O-methyluridine-3'-phosphate
  modified_base 14: mod_base = OTHER; note = 2'-deoxy-2'-fluoroadenosine-3'-phosphate
  modified_base 15: mod_base = OTHER; note = 2'-O-methyladenosine-3'-phosphate
  modified_base 16: mod_base = OTHER; note = 2'-deoxy-2'-fluoroadenosine-3'-phosphate
  modified_base 17: mod_base = OTHER; note = 2'-O-methyladenosine-3'-phosphate
  modified_base 18: mod_base = OTHER; note = 2'-O-methyluridine-3'-phosphate
  modified_base 19: mod_base = OTHER; note = 2'-O-methylcytidine-3'-phosphate
  modified_base 20: mod_base = OTHER; note = 2'-O-methylcytidine-3'-phosphate
  modified_base 21: mod_base = OTHER; note = 2'-O-methylcytidine-3'-phosphorothioate
  modified_base 22: mod_base = OTHER; note = 2'-O-methyluridine-3'-phosphorothioate
  modified_base 23: mod_base = OTHER; note = 2'-O-methylguanosine
taaattagactttaaaatccctg

SEQ ID NO: 12848 - RNA, 23 nt, synthetic construct
  source 1..23: mol_type = other RNA
  modified_base 1: mod_base = OTHER; note = 2'-O-methyluridine-3'-phosphorothioate 5'-(E)-Vinylphosphonate
  modified_base 2: mod_base = OTHER; note = 2'-deoxy-2'-fluorocytidine-3'-phosphorothioate
  modified_base 3: mod_base = OTHER; note = 2'-O-methyluridine-3'-phosphate
  modified_base 4: mod_base = OTHER; note = 2'-O-methyluridine-3'-phosphate
  modified_base 5: mod_base = OTHER; note = 2'-O-methylcytidine-3'-phosphate
  modified_base 6: mod_base = OTHER; note = 2'-deoxy-2'-fluoroguanosine-3'-phosphate
  modified_base 7: mod_base = OTHER; note = 2'-O-methyluridine-3'-phosphate
  modified_base 8: mod_base = OTHER; note = 2'-O-methyladenosine-3'-phosphate
  modified_base 9: mod_base = OTHER; note = 2'-O-methyluridine-3'-phosphate
  modified_base 10: mod_base = OTHER; note = 2'-O-methyluridine-3'-phosphate
  modified_base 11: mod_base = OTHER; note = 2'-O-methyluridine-3'-phosphate
  modified_base 12: mod_base = OTHER; note = 2'-O-methyluridine-3'-phosphate
  modified_base 13: mod_base = OTHER; note = 2'-O-methyladenosine-3'-phosphate
  modified_base 14: mod_base = OTHER; note = 2'-deoxy-2'-fluorouridine-3'-phosphate
  modified_base 15: mod_base = OTHER; note = 2'-O-methylcytidine-3'-phosphate
  modified_base 16: mod_base = OTHER; note = 2'-deoxy-2'-fluorouridine-3'-phosphate
  modified_base 17: mod_base = OTHER; note = 2'-O-methylguanosine-3'-phosphate
  modified_base 18: mod_base = OTHER; note = 2'-O-methyluridine-3'-phosphate
  modified_base 19: mod_base = OTHER; note = 2'-O-methylcytidine-3'-phosphate
  modified_base 20: mod_base = OTHER; note = 2'-O-methyladenosine-3'-phosphate
  modified_base 21: mod_base = OTHER; note = 2'-O-methyladenosine-3'-phosphorothioate
  modified_base 22: mod_base = OTHER; note = 2'-O-methyluridine-3'-phosphorothioate
  modified_base 23: mod_base = OTHER; note = 2'-O-methyluridine
tcttcgtattttatctgtcaatt

SEQ ID NO: 12849 - RNA, 23 nt, synthetic construct
  source 1..23: mol_type = other RNA
  modified_base 1: mod_base = OTHER; note = 2'-O-methyluridine-3'-phosphorothioate 5'-(E)-Vinylphosphonate
  modified_base 2: mod_base = OTHER; note = 2'-deoxy-2'-fluorouridine-3'-phosphorothioate
  modified_base 3: mod_base = OTHER; note = 2'-O-methylcytidine-3'-phosphate
  modified_base 4: mod_base = OTHER; note = 2'-O-methyluridine-3'-phosphate
  modified_base 5: mod_base = OTHER; note = 2'-O-methylguanosine-3'-phosphate
  modified_base 6: mod_base = OTHER; note = 2'-deoxy-2'-fluorouridine-3'-phosphate
  modified_base 7: mod_base = OTHER; note = 2'-O-methylcytidine-3'-phosphate
  modified_base 8: mod_base = OTHER; note = 2'-O-methyladenosine-3'-phosphate
  modified_base 9: mod_base = OTHER; note = 2'-O-methyladenosine-3'-phosphate
  modified_base 10: mod_base = OTHER; note = 2'-O-methyluridine-3'-phosphate
  modified_base 11: mod_base = OTHER; note = 2'-O-methyluridine-3'-phosphate
  modified_base 12: mod_base = OTHER; note = 2'-O-methyluridine-3'-phosphate
  modified_base 13: mod_base = OTHER; note = 2'-O-methyladenosine-3'-phosphate
  modified_base 14: mod_base = OTHER; note = 2'-deoxy-2'-fluoroadenosine-3'-phosphate
  modified_base 15: mod_base = OTHER; note = 2'-O-methyluridine-3'-phosphate
  modified_base 16: mod_base = OTHER; note = 2'-deoxy-2'-fluorocytidine-3'-phosphate
  modified_base 17: mod_base = OTHER; note = 2'-O-methyluridine-3'-phosphate
  modified_base 18: mod_base = OTHER; note = 2'-O-methylcytidine-3'-phosphate
  modified_base 19: mod_base = OTHER; note = 2'-O-methyluridine-3'-phosphate
  modified_base 20: mod_base = OTHER; note = 2'-O-methyluridine-3'-phosphate
  modified_base 21: mod_base = OTHER; note = 2'-O-methylcytidine-3'-phosphorothioate
  modified_base 22: mod_base = OTHER; note = 2'-O-methylcytidine-3'-phosphorothioate
  modified_base 23: mod_base = OTHER; note = 2'-O-methylcytidine
ttctgtcaatttaatctcttccc

SEQ ID NO: 12850 - RNA, 23 nt, synthetic construct
  source 1..23: mol_type = other RNA
  modified_base 1: mod_base = OTHER; note = 2'-O-methyluridine-3'-phosphorothioate 5'-(E)-Vinylphosphonate
  modified_base 2: mod_base = OTHER; note = 2'-deoxy-2'-fluoroadenosine-3'-phosphorothioate
  modified_base 3: mod_base = OTHER; note = 2'-O-methyluridine-3'-phosphate
  modified_base 4: mod_base = OTHER; note = 2'-O-methylcytidine-3'-phosphate
  modified_base 5: mod_base = OTHER; note = 2'-O-methyluridine-3'-phosphate
  modified_base 6: mod_base = OTHER; note = 2'-deoxy-2'-fluoroguanosine-3'-phosphate
  modified_base 7: mod_base = OTHER; note = 2'-O-methyluridine-3'-phosphate
  modified_base 8: mod_base = OTHER; note = 2'-O-methylcytidine-3'-phosphate
  modified_base 9: mod_base = OTHER; note = 2'-O-methyladenosine-3'-phosphate
  modified_base 10: mod_base = OTHER; note = 2'-O-methyladenosine-3'-phosphate
  modified_base 11: mod_base = OTHER; note = 2'-O-methyluridine-3'-phosphate
  modified_base 12: mod_base = OTHER; note = 2'-O-methyluridine-3'-phosphate
  modified_base 13: mod_base = OTHER; note = 2'-O-methyluridine-3'-phosphate
  modified_base 14: mod_base = OTHER; note = 2'-deoxy-2'-fluoroadenosine-3'-phosphate
  modified_base 15: mod_base = OTHER; note = 2'-O-methyladenosine-3'-phosphate
  modified_base 16: mod_base = OTHER; note = 2'-deoxy-2'-fluorouridine-3'-phosphate
  modified_base 17: mod_base = OTHER; note = 2'-O-methylcytidine-3'-phosphate
  modified_base 18: mod_base = OTHER; note = 2'-O-methyluridine-3'-phosphate
  modified_base 19: mod_base = OTHER; note = 2'-O-methylcytidine-3'-phosphate
  modified_base 20: mod_base = OTHER; note = 2'-O-methyluridine-3'-phosphate
  modified_base 21: mod_base = OTHER; note = 2'-O-methyluridine-3'-phosphorothioate
  modified_base 22: mod_base = OTHER; note = 2'-O-methylcytidine-3'-phosphorothioate
  modified_base 23: mod_base = OTHER; note = 2'-O-methylcytidine
tatctgtcaatttaatctcttcc

SEQ ID NO: 12851 - RNA, 23 nt, synthetic construct
  source 1..23: mol_type = other RNA
  modified_base 1: mod_base = OTHER; note = 2'-O-methyluridine-3'-phosphorothioate 5'-(E)-Vinylphosphonate
  modified_base 2: mod_base = OTHER; note = 2'-deoxy-2'-fluorouridine-3'-phosphorothioate
  modified_base 3: mod_base = OTHER; note = 2'-O-methyladenosine-3'-phosphate
  modified_base 4: mod_base = OTHER; note = 2'-O-methyluridine-3'-phosphate
  modified_base 5: mod_base = OTHER; note = 2'-O-methylcytidine-3'-phosphate
  modified_base 6: mod_base = OTHER; note = 2'-deoxy-2'-fluorouridine-3'-phosphate
  modified_base 7: mod_base = OTHER; note = 2'-O-methylguanosine-3'-phosphate
  modified_base 8: mod_base = OTHER; note = 2'-O-methyluridine-3'-phosphate
  modified_base 9: mod_base = OTHER; note = 2'-O-methylcytidine-3'-phosphate
  modified_base 10: mod_base = OTHER; note = 2'-O-methyladenosine-3'-phosphate
  modified_base 11: mod_base = OTHER; note = 2'-O-methyladenosine-3'-phosphate
  modified_base 12: mod_base = OTHER; note = 2'-O-methyluridine-3'-phosphate
  modified_base 13: mod_base = OTHER; note = 2'-O-methyluridine-3'-phosphate
  modified_base 14: mod_base = OTHER; note = 2'-deoxy-2'-fluorouridine-3'-phosphate
  modified_base 15: mod_base = OTHER; note = 2'-O-methyladenosine-3'-phosphate
  modified_base 16: mod_base = OTHER; note = 2'-deoxy-2'-fluoroadenosine-3'-phosphate
  modified_base 17: mod_base = OTHER; note = 2'-O-methyluridine-3'-phosphate
  modified_base 18: mod_base = OTHER; note = 2'-O-methylcytidine-3'-phosphate
  modified_base 19: mod_base = OTHER; note = 2'-O-methyluridine-3'-phosphate
  modified_base 20: mod_base = OTHER; note = 2'-O-methylcytidine-3'-phosphate
  modified_base 21: mod_base = OTHER; note = 2'-O-methyluridine-3'-phosphorothioate
  modified_base 22: mod_base = OTHER; note = 2'-O-methyluridine-3'-phosphorothioate
  modified_base 23: mod_base = OTHER; note = 2'-O-methylcytidine
ttatctgtcaatttaatctcttc

SEQ ID NO: 12852 - RNA, 23 nt, synthetic construct
  source 1..23: mol_type = other RNA
  modified_base 1: mod_base = OTHER; note = 2'-O-methyluridine-3'-phosphorothioate 5'-(E)-Vinylphosphonate
  modified_base 2: mod_base = OTHER; note = 2'-deoxy-2'-fluoroadenosine-3'-phosphorothioate
  modified_base 3: mod_base = OTHER; note = 2'-O-methylcytidine-3'-phosphate
  modified_base 4: mod_base = OTHER; note = 2'-O-methyluridine-3'-phosphate
  modified_base 5: mod_base = OTHER; note = 2'-O-methyluridine-3'-phosphate
  modified_base 6: mod_base = OTHER; note = 2'-deoxy-2'-fluorocytidine-3'-phosphate
  modified_base 7: mod_base = OTHER; note = 2'-O-methylguanosine-3'-phosphate
  modified_base 8: mod_base = OTHER; note = 2'-O-methyluridine-3'-phosphate
  modified_base 9: mod_base = OTHER; note = 2'-O-methyladenosine-3'-phosphate
  modified_base 10: mod_base = OTHER; note = 2'-O-methyluridine-3'-phosphate
  modified_base 11: mod_base = OTHER; note = 2'-O-methyluridine-3'-phosphate
  modified_base 12: mod_base = OTHER; note = 2'-O-methyluridine-3'-phosphate
  modified_base 13: mod_base = OTHER; note = 2'-O-methyluridine-3'-phosphate
  modified_base 14: mod_base = OTHER; note = 2'-deoxy-2'-fluoroadenosine-3'-phosphate
  modified_base 15: mod_base = OTHER; note = 2'-O-methyluridine-3'-phosphate
  modified_base 16: mod_base = OTHER; note = 2'-deoxy-2'-fluorocytidine-3'-phosphate
  modified_base 17: mod_base = OTHER; note = 2'-O-methyluridine-3'-phosphate
  modified_base 18: mod_base = OTHER; note = 2'-O-methylguanosine-3'-phosphate
  modified_base 19: mod_base = OTHER; note = 2'-O-methyluridine-3'-phosphate
  modified_base 20: mod_base = OTHER; note = 2'-O-methylcytidine-3'-phosphate
  modified_base 21: mod_base = OTHER; note = 2'-O-methyladenosine-3'-phosphorothioate
  modified_base 22: mod_base = OTHER; note = 2'-O-methyladenosine-3'-phosphorothioate
  modified_base 23: mod_base = OTHER; note = 2'-O-methyluridine
tacttcgtattttatctgtcaat

SEQ ID NO: 12853 - RNA, 23 nt, synthetic construct
  source 1..23: mol_type = other RNA
  modified_base 1: mod_base = OTHER; note = 2'-O-methyluridine-3'-phosphorothioate 5'-(E)-Vinylphosphonate
  modified_base 2: mod_base = OTHER; note = 2'-deoxy-2'-fluorocytidine-3'-phosphorothioate
  modified_base 3: mod_base = OTHER; note = 2'-O-methyladenosine-3'-phosphate
  modified_base 4: mod_base = OTHER; note = 2'-O-methylcytidine-3'-phosphate
  modified_base 5: mod_base = OTHER; note = 2'-O-methyluridine-3'-phosphate
  modified_base 6: mod_base = OTHER; note = 2'-deoxy-2'-fluorouridine-3'-phosphate
  modified_base 7: mod_base = OTHER; note = 2'-O-methylcytidine-3'-phosphate
  modified_base 8: mod_base = OTHER; note = 2'-O-methylguanosine-3'-phosphate
  modified_base 9: mod_base = OTHER; note = 2'-O-methyluridine-3'-phosphate
  modified_base 10: mod_base = OTHER; note = 2'-O-methyladenosine-3'-phosphate
  modified_base 11: mod_base = OTHER; note = 2'-O-methyluridine-3'-phosphate
  modified_base 12: mod_base = OTHER; note = 2'-O-methyluridine-3'-phosphate
  modified_base 13: mod_base = OTHER; note = 2'-O-methyluridine-3'-phosphate
  modified_base 14: mod_base = OTHER; note = 2'-deoxy-2'-fluorouridine-3'-phosphate
  modified_base 15: mod_base = OTHER; note = 2'-O-methyladenosine-3'-phosphate
  modified_base 16: mod_base = OTHER; note = 2'-deoxy-2'-fluorouridine-3'-phosphate
  modified_base 17: mod_base = OTHER; note = 2'-O-methylcytidine-3'-phosphate
  modified_base 18: mod_base = OTHER; note = 2'-O-methyluridine-3'-phosphate
  modified_base 19: mod_base = OTHER; note = 2'-O-methylguanosine-3'-phosphate
  modified_base 20: mod_base = OTHER; note = 2'-O-methyluridine-3'-phosphate
  modified_base 21: mod_base = OTHER; note = 2'-O-methylcytidine-3'-phosphorothioate
  modified_base 22: mod_base = OTHER; note = 2'-O-methyladenosine-3'-phosphorothioate
  modified_base 23: mod_base = OTHER; note = 2'-O-methyladenosine
tcacttcgtattttatctgtcaa

SEQ ID NO: 12854 - RNA, 23 nt, synthetic construct
  source 1..23: mol_type = other RNA
  modified_base 1: mod_base = OTHER; note = 2'-O-methyluridine-3'-phosphorothioate 5'-(E)-Vinylphosphonate
  modified_base 2: mod_base = OTHER; note = 2'-deoxy-2'-fluorocytidine-3'-phosphorothioate
  modified_base 3: mod_base = OTHER; note = 2'-O-methylcytidine-3'-phosphate
  modified_base 4: mod_base = OTHER; note = 2'-O-methyladenosine-3'-phosphate
  modified_base 5: mod_base = OTHER; note = 2'-O-methylcytidine-3'-phosphate
  modified_base 6: mod_base = OTHER; note = 2'-deoxy-2'-fluorouridine-3'-phosphate
  modified_base 7: mod_base = OTHER; note = 2'-O-methyluridine-3'-phosphate
  modified_base 8: mod_base = OTHER; note = 2'-O-methylcytidine-3'-phosphate
  modified_base 9: mod_base = OTHER; note = 2'-O-methylguanosine-3'-phosphate
  modified_base 10: mod_base = OTHER; note = 2'-O-methyluridine-3'-phosphate
  modified_base 11: mod_base = OTHER; note = 2'-O-methyladenosine-3'-phosphate
  modified_base 12: mod_base = OTHER; note = 2'-O-methyluridine-3'-phosphate
  modified_base 13: mod_base = OTHER; note = 2'-O-methyluridine-3'-phosphate
  modified_base 14: mod_base = OTHER; note = 2'-deoxy-2'-fluorouridine-3'-phosphate
  modified_base 15: mod_base = OTHER; note = 2'-O-methyluridine-3'-phosphate
  modified_base 16: mod_base = OTHER; note = 2'-deoxy-2'-fluoroadenosine-3'-phosphate
  modified_base 17: mod_base = OTHER; note = 2'-O-methyluridine-3'-phosphate
  modified_base 18: mod_base = OTHER; note = 2'-O-methylcytidine-3'-phosphate
  modified_base 19: mod_base = OTHER; note = 2'-O-methyluridine-3'-phosphate
  modified_base 20: mod_base = OTHER; note = 2'-O-methylguanosine-3'-phosphate
  modified_base 21: mod_base = OTHER; note = 2'-O-methyluridine-3'-phosphorothioate
  modified_base 22: mod_base = OTHER; note = 2'-O-methylcytidine-3'-phosphorothioate
  modified_base 23: mod_base = OTHER; note = 2'-O-methyladenosine
tccacttcgtattttatctgtca

SEQ ID NO: 12855 - RNA, 23 nt, synthetic construct
  source 1..23: mol_type = other RNA
  modified_base 1: mod_base = OTHER; note = 2'-O-methyluridine-3'-phosphorothioate 5'-(E)-Vinylphosphonate
  modified_base 2: mod_base = OTHER; note = 2'-deoxy-2'-fluoroadenosine-3'-phosphorothioate
  modified_base 3: mod_base = OTHER; note = 2'-O-methyladenosine-3'-phosphate
  modified_base 4: mod_base = OTHER; note = 2'-O-methylcytidine-3'-phosphate
  modified_base 5: mod_base = OTHER; note = 2'-O-methyluridine-3'-phosphate
  modified_base 6: mod_base = OTHER; note = 2'-deoxy-2'-fluorocytidine-3'-phosphate
  modified_base 7: mod_base = OTHER; note = 2'-O-methyladenosine-3'-phosphate
  modified_base 8: mod_base = OTHER; note = 2'-O-methyladenosine-3'-phosphate
  modified_base 9: mod_base = OTHER; note = 2'-O-methylguanosine-3'-phosphate
  modified_base 10: mod_base = OTHER; note = 2'-O-methyladenosine-3'-phosphate
  modified_base 11: mod_base = OTHER; note = 2'-O-methylcytidine-3'-phosphate
  modified_base 12: mod_base = OTHER; note = 2'-O-methyladenosine-3'-phosphate
  modified_base 13: mod_base = OTHER; note = 2'-O-methyluridine-3'-phosphate
  modified_base 14: mod_base = OTHER; note = 2'-deoxy-2'-fluorocytidine-3'-phosphate
  modified_base 15: mod_base = OTHER; note = 2'-O-methylcytidine-3'-phosphate
  modified_base 16: mod_base = OTHER; note = 2'-deoxy-2'-fluorocytidine-3'-phosphate
  modified_base 17: mod_base = OTHER; note = 2'-O-methyladenosine-3'-phosphate
  modified_base 18: mod_base = OTHER; note = 2'-O-methylcytidine-3'-phosphate
  modified_base 19: mod_base = OTHER; note = 2'-O-methyluridine-3'-phosphate
  modified_base 20: mod_base = OTHER; note = 2'-O-methyluridine-3'-phosphate
  modified_base 21: mod_base = OTHER; note = 2'-O-methylcytidine-3'-phosphorothioate
  modified_base 22: mod_base = OTHER; note = 2'-O-methylguanosine-3'-phosphorothioate
  modified_base 23: mod_base = OTHER; note = 2'-O-methyluridine
taactcaagacatcccacttcgt

SEQ ID NO: 12856 - RNA, 23 nt, synthetic construct
  source 1..23: mol_type = other RNA
  modified_base 1: mod_base = OTHER; note = 2'-O-methyluridine-3'-phosphorothioate 5'-(E)-Vinylphosphonate
  modified_base 2: mod_base = OTHER; note = 2'-deoxy-2'-fluoroadenosine-3'-phosphorothioate
  modified_base 3: mod_base = OTHER; note = 2'-O-methylguanosine-3'-phosphate
  modified_base 4: mod_base = OTHER; note = 2'-O-methyladenosine-3'-phosphate
  modified_base 5: mod_base = OTHER; note = 2'-O-methyladenosine-3'-phosphate
  modified_base 6: mod_base = OTHER; note = 2'-deoxy-2'-fluorocytidine-3'-phosphate
  modified_base 7: mod_base = OTHER; note = 2'-O-methyluridine-3'-phosphate
  modified_base 8: mod_base = OTHER; note = 2'-O-methylcytidine-3'-phosphate
  modified_base 9: mod_base = OTHER; note = 2'-O-methyladenosine-3'-phosphate
  modified_base 10: mod_base = OTHER; note = 2'-O-methyladenosine-3'-phosphate
  modified_base 11: mod_base = OTHER; note = 2'-O-methylguanosine-3'-phosphate
  modified_base 12: mod_base = OTHER; note = 2'-O-methyladenosine-3'-phosphate
  modified_base 13: mod_base = OTHER; note = 2'-O-methylcytidine-3'-phosphate
  modified_base 14: mod_base = OTHER; note = 2'-deoxy-2'-fluoroadenosine-3'-phosphate
  modified_base 15: mod_base = OTHER; note = 2'-O-methyluridine-3'-phosphate
  modified_base 16: mod_base = OTHER; note = 2'-deoxy-2'-fluorocytidine-3'-phosphate
  modified_base 17: mod_base = OTHER; note = 2'-O-methylcytidine-3'-phosphate
  modified_base 18: mod_base = OTHER; note = 2'-O-methylcytidine-3'-phosphate
  modified_base 19: mod_base = OTHER; note = 2'-O-methyladenosine-3'-phosphate
  modified_base 20: mod_base = OTHER; note = 2'-O-methylcytidine-3'-phosphate
  modified_base 21: mod_base = OTHER; note = 2'-O-methyluridine-3'-phosphorothioate
  modified_base 22: mod_base = OTHER; note = 2'-O-methyluridine-3'-phosphorothioate
  modified_base 23: mod_base = OTHER; note = 2'-O-methylcytidine
tagaactcaagacatcccacttc

SEQ ID NO: 12857 - RNA, 23 nt, synthetic construct
  source 1..23: mol_type = other RNA
  modified_base 1: mod_base = OTHER; note = 2'-O-methyluridine-3'-phosphorothioate 5'-(E)-Vinylphosphonate
  modified_base 2: mod_base = OTHER; note = 2'-deoxy-2'-fluorocytidine-3'-phosphorothioate
  modified_base 3: mod_base = OTHER; note = 2'-O-methyladenosine-3'-phosphate
  modified_base 4: mod_base = OTHER; note = 2'-O-methyluridine-3'-phosphate
  modified_base 5: mod_base = OTHER; note = 2'-O-methylguanosine-3'-phosphate
  modified_base 6: mod_base = OTHER; note = 2'-deoxy-2'-fluorocytidine-3'-phosphate
  modified_base 7: mod_base = OTHER; note = 2'-O-methyladenosine-3'-phosphate
  modified_base 8: mod_base = OTHER; note = 2'-O-methylguanosine-3'-phosphate
  modified_base 9: mod_base = OTHER; note = 2'-O-methyladenosine-3'-phosphate
  modified_base 10: mod_base = OTHER; note = 2'-O-methyladenosine-3'-phosphate
  modified_base 11: mod_base = OTHER; note = 2'-O-methylcytidine-3'-phosphate
  modified_base 12: mod_base = OTHER; note = 2'-O-methyluridine-3'-phosphate
  modified_base 13: mod_base = OTHER; note = 2'-O-methylcytidine-3'-phosphate
  modified_base 14: mod_base = OTHER; note = 2'-deoxy-2'-fluoroadenosine-3'-phosphate
  modified_base 15: mod_base = OTHER; note = 2'-O-methyladenosine-3'-phosphate
  modified_base 16: mod_base = OTHER; note = 2'-deoxy-2'-fluoroguanosine-3'-phosphate
  modified_base 17: mod_base = OTHER; note = 2'-O-methyladenosine-3'-phosphate
  modified_base 18: mod_base = OTHER; note = 2'-O-methylcytidine-3'-phosphate
  modified_base 19: mod_base = OTHER; note = 2'-O-methyladenosine-3'-phosphate
  modified_base 20: mod_base = OTHER; note = 2'-O-methyluridine-3'-phosphate
  modified_base 21: mod_base = OTHER; note = 2'-O-methylcytidine-3'-phosphorothioate
  modified_base 22: mod_base = OTHER; note = 2'-O-methylcytidine-3'-phosphorothioate
  modified_base 23: mod_base = OTHER; note = 2'-O-methylcytidine
tcatgcagaactcaagacatccc

SEQ ID NO: 12858 - RNA, 23 nt, synthetic construct
  source 1..23: mol_type = other RNA
  modified_base 1: mod_base = OTHER; note = 2'-O-methyluridine-3'-phosphorothioate 5'-(E)-Vinylphosphonate
  modified_base 2: mod_base = OTHER; note = 2'-deoxy-2'-fluoroadenosine-3'-phosphorothioate
  modified_base 3: mod_base = OTHER; note = 2'-O-methylcytidine-3'-phosphate
  modified_base 4: mod_base = OTHER; note = 2'-O-methylcytidine-3'-phosphate
  modified_base 5: mod_base = OTHER; note = 2'-O-methyluridine-3'-phosphate
  modified_base 6: mod_base = OTHER; note = 2'-deoxy-2'-fluoroadenosine-3'-phosphate
  modified_base 7: mod_base = OTHER; note = 2'-O-methyluridine-3'-phosphate
  modified_base 8: mod_base = OTHER; note = 2'-O-methylcytidine-3'-phosphate
  modified_base 9: mod_base = OTHER; note = 2'-O-methylcytidine-3'-phosphate
  modified_base 10: mod_base = OTHER; note = 2'-O-methyluridine-3'-phosphate
  modified_base 11: mod_base = OTHER; note = 2'-O-methyladenosine-3'-phosphate
  modified_base 12: mod_base = OTHER; note = 2'-O-methylguanosine-3'-phosphate
  modified_base 13: mod_base = OTHER; note = 2'-O-methyladenosine-3'-phosphate
  modified_base 14: mod_base = OTHER; note = 2'-deoxy-2'-fluoroadenosine-3'-phosphate
  modified_base 15: mod_base = OTHER; note = 2'-O-methyladenosine-3'-phosphate
  modified_base 16: mod_base = OTHER; note = 2'-deoxy-2'-fluorocytidine-3'-phosphate
  modified_base 17: mod_base = OTHER; note = 2'-O-methylcytidine-3'-phosphate
  modified_base 18: mod_base = OTHER; note = 2'-O-methylcytidine-3'-phosphate
  modified_base 19: mod_base = OTHER; note = 2'-O-methyladenosine-3'-phosphate
  modified_base 20: mod_base = OTHER; note = 2'-O-methylcytidine-3'-phosphate
  modified_base 21: mod_base = OTHER; note = 2'-O-methyluridine-3'-phosphorothioate
  modified_base 22: mod_base = OTHER; note = 2'-O-methylguanosine-3'-phosphorothioate
  modified_base 23: mod_base = OTHER; note = 2'-O-methyluridine
tacctatcctagaaacccactgt

SEQ ID NO: 12859 - RNA, 23 nt, synthetic construct
  source 1..23: mol_type = other RNA
  modified_base 1: mod_base = OTHER; note = 2'-O-methyluridine-3'-phosphorothioate 5'-(E)-Vinylphosphonate
  modified_base 2: mod_base = OTHER; note = 2'-deoxy-2'-fluoroguanosine-3'-phosphorothioate
  modified_base 3: mod_base = OTHER; note = 2'-O-methyladenosine-3'-phosphate
  modified_base 4: mod_base = OTHER; note = 2'-O-methylcytidine-3'-phosphate
  modified_base 5: mod_base = OTHER; note = 2'-O-methylcytidine-3'-phosphate
  modified_base 6: mod_base = OTHER; note = 2'-deoxy-2'-fluorouridine-3'-phosphate
  modified_base 7: mod_base = OTHER; note = 2'-O-methyladenosine-3'-phosphate
  modified_base 8: mod_base = OTHER; note = 2'-O-methyluridine-3'-phosphate
  modified_base 9: mod_base = OTHER; note = 2'-O-methylcytidine-3'-phosphate
  modified_base 10: mod_base = OTHER; note = 2'-O-methylcytidine-3'-phosphate
  modified_base 11: mod_base = OTHER; note = 2'-O-methyluridine-3'-phosphate
  modified_base 12: mod_base = OTHER; note = 2'-O-methyladenosine-3'-phosphate
  modified_base 13: mod_base = OTHER; note = 2'-O-methylguanosine-3'-phosphate
  modified_base 14: mod_base = OTHER; note = 2'-deoxy-2'-fluoroadenosine-3'-phosphate
  modified_base 15: mod_base = OTHER; note = 2'-O-methyladenosine-3'-phosphate
  modified_base 16: mod_base = OTHER; note = 2'-deoxy-2'-fluoroadenosine-3'-phosphate
  modified_base 17: mod_base = OTHER; note = 2'-O-methylcytidine-3'-phosphate
  modified_base 18: mod_base = OTHER; note = 2'-O-methylcytidine-3'-phosphate
  modified_base 19: mod_base = OTHER; note = 2'-O-methylcytidine-3'-phosphate
  modified_base 20: mod_base = OTHER; note = 2'-O-methyladenosine-3'-phosphate
  modified_base 21: mod_base = OTHER; note = 2'-O-methylcytidine-3'-phosphorothioate
  modified_base 22: mod_base = OTHER; note = 2'-O-methyluridine-3'-phosphorothioate
  modified_base 23: mod_base = OTHER; note = 2'-O-methylguanosine
tgacctatcctagaaacccactg

SEQ ID NO: 12860 - RNA, 23 nt, synthetic construct
  source 1..23: mol_type = other RNA
  modified_base 1: mod_base = OTHER; note = 2'-O-methyluridine-3'-phosphorothioate 5'-(E)-Vinylphosphonate
  modified_base 2: mod_base = OTHER; note = 2'-deoxy-2'-fluoroadenosine-3'-phosphorothioate
  modified_base 3: mod_base = OTHER; note = 2'-O-methylguanosine-3'-phosphate
  modified_base 4: mod_base = OTHER; note = 2'-O-methyladenosine-3'-phosphate
  modified_base 5: mod_base = OTHER; note = 2'-O-methylcytidine-3'-phosphate
  modified_base 6: mod_base = OTHER; note = 2'-deoxy-2'-fluorocytidine-3'-phosphate
  modified_base 7: mod_base = OTHER; note = 2'-O-methyluridine-3'-phosphate
  modified_base 8: mod_base = OTHER; note = 2'-O-methyladenosine-3'-phosphate
  modified_base 9: mod_base = OTHER; note = 2'-O-methyluridine-3'-phosphate
  modified_base 10: mod_base = OTHER; note = 2'-O-methylcytidine-3'-phosphate
  modified_base 11: mod_base = OTHER; note = 2'-O-methylcytidine-3'-phosphate
  modified_base 12: mod_base = OTHER; note = 2'-O-methyluridine-3'-phosphate
  modified_base 13: mod_base = OTHER; note = 2'-O-methyladenosine-3'-phosphate
  modified_base 14: mod_base = OTHER; note = 2'-deoxy-2'-fluoroguanosine-3'-phosphate
  modified_base 15: mod_base = OTHER; note = 2'-O-methyladenosine-3'-phosphate
  modified_base 16: mod_base = OTHER; note = 2'-deoxy-2'-fluoroadenosine-3'-phosphate
  modified_base 17: mod_base = OTHER; note = 2'-O-methyladenosine-3'-phosphate
  modified_base 18: mod_base = OTHER; note = 2'-O-methylcytidine-3'-phosphate
  modified_base 19: mod_base = OTHER; note = 2'-O-methylcytidine-3'-phosphate
  modified_base 20: mod_base = OTHER; note = 2'-O-methylcytidine-3'-phosphate
  modified_base 21: mod_base = OTHER; note = 2'-O-methyladenosine-3'-phosphorothioate
  modified_base 22: mod_base = OTHER; note = 2'-O-methylcytidine-3'-phosphorothioate
  modified_base 23: mod_base = OTHER; note = 2'-O-methyluridine
tagacctatcctagaaacccact

SEQ ID NO: 12861 - RNA, 23 nt, synthetic construct
  source 1..23: mol_type = other RNA
  modified_base 1: mod_base = OTHER; note = 2'-O-methyluridine-3'-phosphorothioate 5'-(E)-Vinylphosphonate
  modified_base 2: mod_base = OTHER; note = 2'-deoxy-2'-fluorocytidine-3'-phosphorothioate
  modified_base 3: mod_base = OTHER; note = 2'-O-methyladenosine-3'-phosphate
  modified_base 4: mod_base = OTHER; note = 2'-O-methylguanosine-3'-phosphate
  modified_base 5: mod_base = OTHER; note = 2'-O-methyladenosine-3'-phosphate
  modified_base 6: mod_base = OTHER; note = 2'-deoxy-2'-fluorocytidine-3'-phosphate
  modified_base 7: mod_base = OTHER; note = 2'-O-methylcytidine-3'-phosphate
  modified_base 8: mod_base = OTHER; note = 2'-O-methyluridine-3'-phosphate
  modified_base 9: mod_base = OTHER; note = 2'-O-methyladenosine-3'-phosphate
  modified_base 10: mod_base = OTHER; note = 2'-O-methyluridine-3'-phosphate
  modified_base 11: mod_base = OTHER; note = 2'-O-methylcytidine-3'-phosphate
  modified_base 12: mod_base = OTHER; note = 2'-O-methylcytidine-3'-phosphate
  modified_base 13: mod_base = OTHER; note = 2'-O-methyluridine-3'-phosphate
  modified_base 14: mod_base = OTHER; note = 2'-deoxy-2'-fluoroadenosine-3'-phosphate
  modified_base 15: mod_base = OTHER; note = 2'-O-methylguanosine-3'-phosphate
  modified_base 16: mod_base = OTHER; note = 2'-deoxy-2'-fluoroadenosine-3'-phosphate
  modified_base 17: mod_base = OTHER; note = 2'-O-methyladenosine-3'-phosphate
  modified_base 18: mod_base = OTHER; note = 2'-O-methyladenosine-3'-phosphate
  modified_base 19: mod_base = OTHER; note = 2'-O-methylcytidine-3'-phosphate
  modified_base 20: mod_base = OTHER; note = 2'-O-methylcytidine-3'-phosphate
  modified_base 21: mod_base = OTHER; note = 2'-O-methylcytidine-3'-phosphorothioate
  modified_base 22: mod_base = OTHER; note = 2'-O-methyladenosine-3'-phosphorothioate
  modified_base 23: mod_base = OTHER; note = 2'-O-methylcytidine
tcagacctatcctagaaacccac

SEQ ID NO: 12862 - RNA, 23 nt, synthetic construct
  source 1..23: mol_type = other RNA
  modified_base 1: mod_base = OTHER; note = 2'-O-methyluridine-3'-phosphorothioate 5'-(E)-Vinylphosphonate
  modified_base 2: mod_base = OTHER; note = 2'-deoxy-2'-fluorouridine-3'-phosphorothioate
  modified_base 3: mod_base = OTHER; note = 2'-O-methylcytidine-3'-phosphate
  modified_base 4: mod_base = OTHER; note = 2'-O-methyladenosine-3'-phosphate
  modified_base 5: mod_base = OTHER; note = 2'-O-methylguanosine-3'-phosphate
  modified_base 6: mod_base = OTHER; note = 2'-deoxy-2'-fluoroadenosine-3'-phosphate
  modified_base 7: mod_base = OTHER; note = 2'-O-methylcytidine-3'-phosphate
  modified_base 8: mod_base = OTHER; note = 2'-O-methylcytidine-3'-phosphate
  modified_base 9: mod_base = OTHER; note = 2'-O-methyluridine-3'-phosphate
  modified_base 10: mod_base = OTHER; note = 2'-O-methyladenosine-3'-phosphate
  modified_base 11: mod_base = OTHER; note = 2'-O-methyluridine-3'-phosphate
  modified_base 12: mod_base = OTHER; note = 2'-O-methylcytidine-3'-phosphate
  modified_base 13: mod_base = OTHER; note = 2'-O-methylcytidine-3'-phosphate
  modified_base 14: mod_base = OTHER; note = 2'-deoxy-2'-fluorouridine-3'-phosphate
  modified_base 15: mod_base = OTHER; note = 2'-O-methyladenosine-3'-phosphate
  modified_base 16: mod_base = OTHER; note = 2'-deoxy-2'-fluoroguanosine-3'-phosphate
  modified_base 17: mod_base = OTHER; note = 2'-O-methyladenosine-3'-phosphate
  modified_base 18: mod_base = OTHER; note = 2'-O-methyladenosine-3'-phosphate
  modified_base 19: mod_base = OTHER; note = 2'-O-methyladenosine-3'-phosphate
  modified_base 20: mod_base = OTHER; note = 2'-O-methylcytidine-3'-phosphate
  modified_base 21: mod_base = OTHER; note = 2'-O-methylcytidine-3'-phosphorothioate
  modified_base 22: mod_base = OTHER; note = 2'-O-methylcytidine-3'-phosphorothioate
  modified_base 23: mod_base = OTHER; note = 2'-O-methyladenosine
ttcagacctatcctagaaaccca

SEQ ID NO: 12863 - RNA, 23 nt, synthetic construct
  source 1..23: mol_type = other RNA
  modified_base 1: mod_base = OTHER; note = 2'-O-methyluridine-3'-phosphorothioate 5'-(E)-Vinylphosphonate
  modified_base 2: mod_base = OTHER; note = 2'-deoxy-2'-fluorouridine-3'-phosphorothioate
  modified_base 3: mod_base = OTHER; note = 2'-O-methyluridine-3'-phosphate
  modified_base 4: mod_base = OTHER; note = 2'-O-methylcytidine-3'-phosphate
  modified_base 5: mod_base = OTHER; note = 2'-O-methyladenosine-3'-phosphate
  modified_base 6: mod_base = OTHER; note = 2'-deoxy-2'-fluoroguanosine-3'-phosphate
  modified_base 7: mod_base = OTHER; note = 2'-O-methyladenosine-3'-phosphate
  modified_base 8: mod_base = OTHER; note = 2'-O-methylcytidine-3'-phosphate
  modified_base 9: mod_base = OTHER; note = 2'-O-methylcytidine-3'-phosphate
  modified_base 10: mod_base = OTHER; note = 2'-O-methyluridine-3'-phosphate
  modified_base 11: mod_base = OTHER; note = 2'-O-methyladenosine-3'-phosphate
  modified_base 12: mod_base = OTHER; note = 2'-O-methyluridine-3'-phosphate
  modified_base 13: mod_base = OTHER; note = 2'-O-methylcytidine-3'-phosphate
  modified_base 14: mod_base = OTHER; note = 2'-deoxy-2'-fluorocytidine-3'-phosphate
  modified_base 15: mod_base = OTHER; note = 2'-O-methyluridine-3'-phosphate
  modified_base 16: mod_base = OTHER; note = 2'-deoxy-2'-fluoroadenosine-3'-phosphate
  modified_base 17: mod_base = OTHER; note = 2'-O-methylguanosine-3'-phosphate
  modified_base 18: mod_base = OTHER; note = 2'-O-methyladenosine-3'-phosphate
  modified_base 19: mod_base = OTHER; note = 2'-O-methyladenosine-3'-phosphate
  modified_base 20: mod_base = OTHER; note = 2'-O-methyladenosine-3'-phosphate
  modified_base 21: mod_base = OTHER; note = 2'-O-methylcytidine-3'-phosphorothioate
  modified_base 22: mod_base = OTHER; note = 2'-O-methylcytidine-3'-phosphorothioate
  modified_base 23: mod_base = OTHER; note = 2'-O-methylcytidine
tttcagacctatcctagaaaccc

SEQ ID NO: 12864 - RNA, 23 nt, synthetic construct
  source 1..23: mol_type = other RNA
  modified_base 1: mod_base = OTHER; note = 2'-O-methyluridine-3'-phosphorothioate 5'-(E)-Vinylphosphonate
  modified_base 2: mod_base = OTHER; note = 2'-deoxy-2'-fluorouridine-3'-phosphorothioate
  modified_base 3: mod_base = OTHER; note = 2'-O-methyluridine-3'-phosphate
  modified_base 4: mod_base = OTHER; note = 2'-O-methyluridine-3'-phosphate
  modified_base 5: mod_base = OTHER; note = 2'-O-methylcytidine-3'-phosphate
  modified_base 6: mod_base = OTHER; note = 2'-deoxy-2'-fluoroadenosine-3'-phosphate
  modified_base 7: mod_base = OTHER; note = 2'-O-methylguanosine-3'-phosphate
  modified_base 8: mod_base = OTHER; note = 2'-O-methyladenosine-3'-phosphate
  modified_base 9: mod_base = OTHER; note = 2'-O-methylcytidine-3'-phosphate
  modified_base 10: mod_base = OTHER; note = 2'-O-methylcytidine-3'-phosphate
  modified_base 11: mod_base = OTHER; note = 2'-O-methyluridine-3'-phosphate
  modified_base 12: mod_base = OTHER; note = 2'-O-methyladenosine-3'-phosphate
  modified_base 13: mod_base = OTHER; note = 2'-O-methyluridine-3'-phosphate
  modified_base 14: mod_base = OTHER; note = 2'-deoxy-2'-fluorocytidine-3'-phosphate
  modified_base 15: mod_base = OTHER; note = 2'-O-methylcytidine-3'-phosphate
  modified_base 16: mod_base = OTHER; note = 2'-deoxy-2'-fluorouridine-3'-phosphate
  modified_base 17: mod_base = OTHER; note = 2'-O-methyladenosine-3'-phosphate
  modified_base 18: mod_base = OTHER; note = 2'-O-methylguanosine-3'-phosphate
  modified_base 19: mod_base = OTHER; note = 2'-O-methyladenosine-3'-phosphate
  modified_base 20: mod_base = OTHER; note = 2'-O-methyladenosine-3'-phosphate
  modified_base 21: mod_base = OTHER; note = 2'-O-methyladenosine-3'-phosphorothioate
  modified_base 22: mod_base = OTHER; note = 2'-O-methylcytidine-3'-phosphorothioate
  modified_base 23: mod_base = OTHER; note = 2'-O-methylcytidine
ttttcagacctatcctagaaacc

SEQ ID NO: 12865 - RNA, 23 nt, synthetic construct
  source 1..23: mol_type = other RNA
  modified_base 1: mod_base = OTHER; note = 2'-O-methyluridine-3'-phosphorothioate 5'-(E)-Vinylphosphonate
  modified_base 2: mod_base = OTHER; note = 2'-deoxy-2'-fluorouridine-3'-phosphorothioate
  modified_base 3: mod_base = OTHER; note = 2'-O-methyluridine-3'-phosphate
  modified_base 4: mod_base = OTHER; note = 2'-O-methyluridine-3'-phosphate
  modified_base 5: mod_base = OTHER; note = 2'-O-methyluridine-3'-phosphate
  modified_base 6: mod_base = OTHER; note = 2'-deoxy-2'-fluorocytidine-3'-phosphate
  modified_base 7: mod_base = OTHER; note = 2'-O-methyladenosine-3'-phosphate
  modified_base 8: mod_base = OTHER; note = 2'-O-methylguanosine-3'-phosphate
  modified_base 9: mod_base = OTHER; note = 2'-O-methyladenosine-3'-phosphate
  modified_base 10: mod_base = OTHER; note = 2'-O-methylcytidine-3'-phosphate
  modified_base 11: mod_base = OTHER; note = 2'-O-methylcytidine-3'-phosphate
  modified_base 12: mod_base = OTHER; note = 2'-O-methyluridine-3'-phosphate
  modified_base 13: mod_base = OTHER; note = 2'-O-methyladenosine-3'-phosphate
  modified_base 14: mod_base = OTHER; note = 2'-deoxy-2'-fluorouridine-3'-phosphate
  modified_base 15: mod_base = OTHER; note = 2'-O-methylcytidine-3'-phosphate
  modified_base 16: mod_base = OTHER; note = 2'-deoxy-2'-fluorocytidine-3'-phosphate
  modified_base 17: mod_base = OTHER; note = 2'-O-methyluridine-3'-phosphate
  modified_base 18: mod_base = OTHER; note = 2'-O-methyladenosine-3'-phosphate
  modified_base 19: mod_base = OTHER; note = 2'-O-methylguanosine-3'-phosphate
  modified_base 20: mod_base = OTHER; note = 2'-O-methyladenosine-3'-phosphate
  modified_base 21: mod_base = OTHER; note = 2'-O-methyladenosine-3'-phosphorothioate
  modified_base 22: mod_base = OTHER; note = 2'-O-methyladenosine-3'-phosphorothioate
  modified_base 23: mod_base = OTHER; note = 2'-O-methylcytidine
tttttcagacctatcctagaaac

SEQ ID NO: 12866 - RNA, 23 nt, synthetic construct
  source 1..23: mol_type = other RNA
  modified_base 1: mod_base = OTHER; note = 2'-O-methyluridine-3'-phosphorothioate 5'-(E)-Vinylphosphonate
  modified_base 2: mod_base = OTHER; note = 2'-deoxy-2'-fluoroadenosine-3'-phosphorothioate
  modified_base 3: mod_base = OTHER; note = 2'-O-methyluridine-3'-phosphate
  modified_base 4: mod_base = OTHER; note = 2'-O-methyluridine-3'-phosphate
  modified_base 5: mod_base = OTHER; note = 2'-O-methyluridine-3'-phosphate
  modified_base 6: mod_base = OTHER; note = 2'-deoxy-2'-fluorouridine-3'-phosphate
  modified_base 7: mod_base = OTHER; note = 2'-O-methylcytidine-3'-phosphate
  modified_base 8: mod_base = OTHER; note = 2'-O-methyladenosine-3'-phosphate
  modified_base 9: mod_base = OTHER; note = 2'-O-methylguanosine-3'-phosphate
  modified_base 10: mod_base = OTHER; note = 2'-O-methyladenosine-3'-phosphate
  modified_base 11: mod_base = OTHER; note = 2'-O-methylcytidine-3'-phosphate
  modified_base 12: mod_base = OTHER; note = 2'-O-methylcytidine-3'-phosphate
  modified_base 13: mod_base = OTHER; note = 2'-O-methyluridine-3'-phosphate
  modified_base 14: mod_base = OTHER; note = 2'-deoxy-2'-fluoroadenosine-3'-phosphate
  modified_base 15: mod_base = OTHER; note = 2'-O-methyluridine-3'-phosphate
  modified_base 16: mod_base = OTHER; note = 2'-deoxy-2'-fluorocytidine-3'-phosphate
  modified_base 17: mod_base = OTHER; note = 2'-O-methylcytidine-3'-phosphate
  modified_base 18: mod_base = OTHER; note = 2'-O-methyluridine-3'-phosphate
  modified_base 19: mod_base = OTHER; note = 2'-O-methyladenosine-3'-phosphate
  modified_base 20: mod_base = OTHER; note = 2'-O-methylguanosine-3'-phosphate
  modified_base 21: mod_base = OTHER; note = 2'-O-methyladenosine-3'-phosphorothioate
  modified_base 22: mod_base = OTHER; note = 2'-O-methyladenosine-3'-phosphorothioate
  modified_base 23: mod_base = OTHER; note = 2'-O-methyladenosine
tattttcagacctatcctagaaa

SEQ ID NO: 12867 - RNA, 23 nt, synthetic construct
  source 1..23: mol_type = other RNA
  modified_base 1: mod_base = OTHER; note = 2'-O-methyluridine-3'-phosphorothioate 5'-(E)-Vinylphosphonate
  modified_base 2: mod_base = OTHER; note = 2'-deoxy-2'-fluoroadenosine-3'-phosphorothioate
  modified_base 3: mod_base = OTHER; note = 2'-O-methyladenosine-3'-phosphate
  modified_base 4: mod_base = OTHER; note = 2'-O-methyluridine-3'-phosphate
  modified_base 5: mod_base = OTHER; note = 2'-O-methyluridine-3'-phosphate
  modified_base 6: mod_base = OTHER; note = 2'-deoxy-2'-fluorouridine-3'-phosphate
  modified_base 7: mod_base = OTHER; note = 2'-O-methyluridine-3'-phosphate
  modified_base 8: mod_base = OTHER; note = 2'-O-methylcytidine-3'-phosphate
  modified_base 9: mod_base = OTHER; note = 2'-O-methyladenosine-3'-phosphate
  modified_base 10: mod_base = OTHER; note = 2'-O-methylguanosine-3'-phosphate
  modified_base 11: mod_base = OTHER; note = 2'-O-methyladenosine-3'-phosphate
  modified_base 12: mod_base = OTHER; note = 2'-O-methylcytidine-3'-phosphate
  modified_base 13: mod_base = OTHER; note = 2'-O-methylcytidine-3'-phosphate
  modified_base 14: mod_base = OTHER; note = 2'-deoxy-2'-fluorouridine-3'-phosphate
  modified_base 15: mod_base = OTHER; note = 2'-O-methyladenosine-3'-phosphate
  modified_base 16: mod_base = OTHER; note = 2'-deoxy-2'-fluorouridine-3'-phosphate
  modified_base 17: mod_base = OTHER; note = 2'-O-methylcytidine-3'-phosphate
  modified_base 18: mod_base = OTHER; note = 2'-O-methylcytidine-3'-phosphate
  modified_base 19: mod_base = OTHER; note = 2'-O-methyluridine-3'-phosphate
  modified_base 20: mod_base = OTHER; note = 2'-O-methyladenosine-3'-phosphate
  modified_base 21: mod_base = OTHER; note = 2'-O-methylguanosine-3'-phosphorothioate
  modified_base 22: mod_base = OTHER; note = 2'-O-methyladenosine-3'-phosphorothioate
  modified_base 23: mod_base = OTHER; note = 2'-O-methyladenosine
taattttcagacctatcctagaa

SEQ ID NO: 12868 - RNA, 23 nt, synthetic construct
  source 1..23: mol_type = other RNA
  modified_base 1: mod_base = OTHER; note = 2'-O-methyluridine-3'-phosphorothioate 5'-(E)-Vinylphosphonate
  modified_base 2: mod_base = OTHER; note = 2'-deoxy-2'-fluorocytidine-3'-phosphorothioate
  modified_base 3: mod_base = OTHER; note = 2'-O-methyladenosine-3'-phosphate
  modified_base 4: mod_base = OTHER; note = 2'-O-methyladenosine-3'-phosphate
  modified_base 5: mod_base = OTHER; note = 2'-O-methyluridine-3'-phosphate
  modified_base 6: mod_base = OTHER; note = 2'-deoxy-2'-fluorouridine-3'-phosphate
  modified_base 7: mod_base = OTHER; note = 2'-O-methyluridine-3'-phosphate
  modified_base 8: mod_base = OTHER; note = 2'-O-methyluridine-3'-phosphate
  modified_base 9: mod_base = OTHER; note = 2'-O-methylcytidine-3'-phosphate
  modified_base 10: mod_base = OTHER; note = 2'-O-methyladenosine-3'-phosphate
  modified_base 11: mod_base = OTHER; note = 2'-O-methylguanosine-3'-phosphate
  modified_base 12: mod_base = OTHER; note = 2'-O-methyladenosine-3'-phosphate
  modified_base 13: mod_base = OTHER; note = 2'-O-methylcytidine-3'-phosphate
  modified_base 14: mod_base = OTHER; note = 2'-deoxy-2'-fluorocytidine-3'-phosphate
  modified_base 15: mod_base = OTHER; note = 2'-O-methyluridine-3'-phosphate
  modified_base 16: mod_base = OTHER; note = 2'-deoxy-2'-fluoroadenosine-3'-phosphate
  modified_base 17: mod_base = OTHER; note = 2'-O-methyluridine-3'-phosphate
  modified_base 18: mod_base = OTHER; note = 2'-O-methylcytidine-3'-phosphate
  modified_base 19: mod_base = OTHER; note = 2'-O-methylcytidine-3'-phosphate
  modified_base 20: mod_base = OTHER; note = 2'-O-methyluridine-3'-phosphate
  modified_base 21: mod_base = OTHER; note = 2'-O-methyladenosine-3'-phosphorothioate
  modified_base 22: mod_base = OTHER; note = 2'-O-methylguanosine-3'-phosphorothioate
  modified_base 23: mod_base = OTHER; note = 2'-O-methyladenosine
tcaattttcagacctatcctaga

SEQ ID NO: 12869 - RNA, 23 nt, synthetic construct
  source 1..23: mol_type = other RNA
  modified_base 1: mod_base = OTHER; note = 2'-O-methyluridine-3'-phosphorothioate 5'-(E)-Vinylphosphonate
  modified_base 2: mod_base = OTHER; note = 2'-deoxy-2'-fluorocytidine-3'-phosphorothioate
  modified_base 3: mod_base = OTHER; note = 2'-O-methyladenosine-3'-phosphate
  modified_base 4: mod_base = OTHER; note = 2'-O-methyladenosine-3'-phosphate
  modified_base 5: mod_base = OTHER; note = 2'-O-methyladenosine-3'-phosphate
  modified_base 6: mod_base = OTHER; note = 2'-deoxy-2'-fluorouridine-3'-phosphate
  modified_base 7: mod_base = OTHER; note = 2'-O-methylguanosine-3'-phosphate
  modified_base 8: mod_base = OTHER; note = 2'-O-methyladenosine-3'-phosphate
  modified_base 9: mod_base = OTHER; note = 2'-O-methyladenosine-3'-phosphate
  modified_base 10: mod_base = OTHER; note = 2'-O-methyladenosine-3'-phosphate
  modified_base 11: mod_base = OTHER; note = 2'-O-methylguanosine-3'-phosphate
  modified_base 12: mod_base = OTHER; note = 2'-O-methylcytidine-3'-phosphate
  modified_base 13: mod_base = OTHER; note = 2'-O-methyladenosine-3'-phosphate
  modified_base 14: mod_base = OTHER; note = 2'-deoxy-2'-fluoroadenosine-3'-phosphate
  modified_base 15: mod_base = OTHER; note = 2'-O-methyluridine-3'-phosphate
  modified_base 16: mod_base = OTHER; note = 2'-deoxy-2'-fluorouridine-3'-phosphate
  modified_base 17: mod_base = OTHER; note = 2'-O-methyluridine-3'-phosphate
  modified_base 18: mod_base = OTHER; note = 2'-O-methyluridine-3'-phosphate
  modified_base 19: mod_base = OTHER; note = 2'-O-methylcytidine-3'-phosphate
  modified_base 20: mod_base = OTHER; note = 2'-O-methyladenosine-3'-phosphate
  modified_base 21: mod_base = OTHER; note = 2'-O-methylguanosine-3'-phosphorothioate
  modified_base 22: mod_base = OTHER; note = 2'-O-methyladenosine-3'-phosphorothioate
  modified_base 23: mod_base = OTHER; note = 2'-O-methylcytidine
tcaaatgaaagcaattttcagac

SEQ ID NO: 12870 - RNA, 23 nt, synthetic construct
  source 1..23: mol_type = other RNA
  modified_base 1: mod_base = OTHER; note = 2'-O-methyluridine-3'-phosphorothioate 5'-(E)-Vinylphosphonate
  modified_base 2: mod_base = OTHER; note = 2'-deoxy-2'-fluoroguanosine-3'-phosphorothioate
  modified_base 3: mod_base = OTHER; note = 2'-O-methyluridine-3'-phosphate
  modified_base 4: mod_base = OTHER; note = 2'-O-methylguanosine-3'-phosphate
  modified_base 5: mod_base = OTHER; note = 2'-O-methyluridine-3'-phosphate
  modified_base 6: mod_base = OTHER; note = 2'-deoxy-2'-fluorouridine-3'-phosphate
  modified_base 7: mod_base = OTHER; note = 2'-O-methylguanosine-3'-phosphate
  modified_base 8: mod_base = OTHER; note = 2'-O-methylcytidine-3'-phosphate
  modified_base 9: mod_base = OTHER; note = 2'-O-methyladenosine-3'-phosphate
  modified_base 10: mod_base = OTHER; note = 2'-O-methyladenosine-3'-phosphate
  modified_base 11: mod_base = OTHER; note = 2'-O-methyladenosine-3'-phosphate
  modified_base 12: mod_base = OTHER; note = 2'-O-methyluridine-3'-phosphate
  modified_base 13: mod_base = OTHER; note = 2'-O-methylguanosine-3'-phosphate
  modified_base 14: mod_base = OTHER; note = 2'-deoxy-2'-fluoroadenosine-3'-phosphate
  modified_base 15: mod_base = OTHER; note = 2'-O-methyladenosine-3'-phosphate
  modified_base 16: mod_base = OTHER; note = 2'-deoxy-2'-fluoroadenosine-3'-phosphate
  modified_base 17: mod_base = OTHER; note = 2'-O-methylguanosine-3'-phosphate
  modified_base 18: mod_base = OTHER; note = 2'-O-methylcytidine-3'-phosphate
  modified_base 19: mod_base = OTHER; note = 2'-O-methyladenosine-3'-phosphate
  modified_base 20: mod_base = OTHER; note = 2'-O-methyladenosine-3'-phosphate
  modified_base 21: mod_base = OTHER; note = 2'-O-methyluridine-3'-phosphorothioate
  modified_base 22: mod_base = OTHER; note = 2'-O-methyluridine-3'-phosphorothioate
  modified_base 23: mod_base = OTHER; note = 2'-O-methyluridine
tgtgttgcaaatgaaagcaattt

SEQ ID NO: 12871 - RNA, 23 nt, synthetic construct
  source 1..23: mol_type = other RNA
  modified_base 1: mod_base = OTHER; note = 2'-O-methyluridine-3'-phosphorothioate 5'-(E)-Vinylphosphonate
  modified_base 2: mod_base = OTHER; note = 2'-deoxy-2'-fluorouridine-3'-phosphorothioate
  modified_base 3: mod_base = OTHER; note = 2'-O-methylguanosine-3'-phosphate
  modified_base 4: mod_base = OTHER; note = 2'-O-methyluridine-3'-phosphate
  modified_base 5: mod_base = OTHER; note = 2'-O-methylguanosine-3'-phosphate
  modified_base 6: mod_base = OTHER; note = 2'-deoxy-2'-fluorouridine-3'-phosphate
  modified_base 7: mod_base = OTHER; note = 2'-O-methyluridine-3'-phosphate
  modified_base 8: mod_base = OTHER; note = 2'-O-methylguanosine-3'-phosphate
  modified_base 9: mod_base = OTHER; note = 2'-O-methylcytidine-3'-phosphate
  modified_base 10: mod_base = OTHER; note = 2'-O-methyladenosine-3'-phosphate
  modified_base 11: mod_base = OTHER; note = 2'-O-methyladenosine-3'-phosphate
  modified_base 12: mod_base = OTHER; note = 2'-O-methyladenosine-3'-phosphate
  modified_base 13: mod_base = OTHER; note = 2'-O-methyluridine-3'-phosphate
  modified_base 14: mod_base = OTHER; note = 2'-deoxy-2'-fluoroguanosine-3'-phosphate
  modified_base 15: mod_base = OTHER; note = 2'-O-methyladenosine-3'-phosphate
  modified_base 16: mod_base = OTHER; note = 2'-deoxy-2'-fluoroadenosine-3'-phosphate
  modified_base 17: mod_base = OTHER; note = 2'-O-methyladenosine-3'-phosphate
  modified_base 18: mod_base = OTHER; note = 2'-O-methylguanosine-3'-phosphate
  modified_base 19: mod_base = OTHER; note = 2'-O-methylcytidine-3'-phosphate
  modified_base 20: mod_base = OTHER; note = 2'-O-methyladenosine-3'-phosphate
  modified_base 21: mod_base = OTHER; note = 2'-O-methyladenosine-3'-phosphorothioate
  modified_base 22: mod_base = OTHER; note = 2'-O-methyluridine-3'-phosphorothioate
  modified_base 23: mod_base = OTHER; note = 2'-O-methyluridine
ttgtgttgcaaatgaaagcaatt

SEQ ID NO: 12872 - RNA, 23 nt, synthetic construct
  source 1..23: mol_type = other RNA
  modified_base 1: mod_base = OTHER; note = 2'-O-methyluridine-3'-phosphorothioate 5'-(E)-Vinylphosphonate
  modified_base 2: mod_base = OTHER; note = 2'-deoxy-2'-fluoroadenosine-3'-phosphorothioate
  modified_base 3: mod_base = OTHER; note = 2'-O-methyluridine-3'-phosphate
  modified_base 4: mod_base = OTHER; note = 2'-O-methylguanosine-3'-phosphate
  modified_base 5: mod_base = OTHER; note = 2'-O-methyluridine-3'-phosphate
  modified_base 6: mod_base = OTHER; note = 2'-deoxy-2'-fluoroguanosine-3'-phosphate
  modified_base 7: mod_base = OTHER; note = 2'-O-methyluridine-3'-phosphate
  modified_base 8: mod_base = OTHER; note = 2'-O-methyluridine-3'-phosphate
  modified_base 9: mod_base = OTHER; note = 2'-O-methylguanosine-3'-phosphate
  modified_base 10: mod_base = OTHER; note = 2'-O-methylcytidine-3'-phosphate
  modified_base 11: mod_base = OTHER; note = 2'-O-methyladenosine-3'-phosphate
  modified_base 12: mod_base = OTHER; note = 2'-O-methyladenosine-3'-phosphate
  modified_base 13: mod_base = OTHER; note = 2'-O-methyladenosine-3'-phosphate
  modified_base 14: mod_base = OTHER; note = 2'-deoxy-2'-fluorouridine-3'-phosphate
  modified_base 15: mod_base = OTHER; note = 2'-O-methylguanosine-3'-phosphate
  modified_base 16: mod_base = OTHER; note = 2'-deoxy-2'-fluoroadenosine-3'-phosphate
  modified_base 17: mod_base = OTHER; note = 2'-O-methyladenosine-3'-phosphate
  modified_base 18: mod_base = OTHER; note = 2'-O-methyladenosine-3'-phosphate
  modified_base 19: mod_base = OTHER; note = 2'-O-methylguanosine-3'-phosphate
  modified_base 20: mod_base = OTHER; note = 2'-O-methylcytidine-3'-phosphate
  modified_base 21: mod_base = OTHER; note = 2'-O-methyladenosine-3'-phosphorothioate
  modified_base 22: mod_base = OTHER; note = 2'-O-methyladenosine-3'-phosphorothioate
  modified_base 23: mod_base = OTHER; note = 2'-O-methyluridine
tatgtgttgcaaatgaaagcaat

SEQ ID NO: 12873 - RNA, 23 nt, synthetic construct
  source 1..23: mol_type = other RNA
  modified_base 1: mod_base = OTHER; note = 2'-O-methyluridine-3'-phosphorothioate 5'-(E)-Vinylphosphonate
  modified_base 2: mod_base = OTHER; note = 2'-deoxy-2'-fluoroadenosine-3'-phosphorothioate
  modified_base 3: mod_base = OTHER; note = 2'-O-methyladenosine-3'-phosphate
  modified_base 4: mod_base = OTHER; note = 2'-O-methyluridine-3'-phosphate
  modified_base 5: mod_base = OTHER; note = 2'-O-methylguanosine-3'-phosphate
  modified_base 6: mod_base = OTHER; note = 2'-deoxy-2'-fluorouridine-3'-phosphate
  modified_base 7: mod_base = OTHER; note = 2'-O-methylguanosine-3'-phosphate
  modified_base 8: mod_base = OTHER; note = 2'-O-methyluridine-3'-phosphate
  modified_base 9: mod_base = OTHER; note = 2'-O-methyluridine-3'-phosphate
  modified_base 10: mod_base = OTHER; note = 2'-O-methylguanosine-3'-phosphate
  modified_base 11: mod_base = OTHER; note = 2'-O-methylcytidine-3'-phosphate
  modified_base 12: mod_base = OTHER; note = 2'-O-methyladenosine-3'-phosphate
  modified_base 13: mod_base = OTHER; note = 2'-O-methyladenosine-3'-phosphate
  modified_base 14: mod_base = OTHER; note = 2'-deoxy-2'-fluoroadenosine-3'-phosphate
  modified_base 15: mod_base = OTHER; note = 2'-O-methyluridine-3'-phosphate
  modified_base 16: mod_base = OTHER; note = 2'-deoxy-2'-fluoroguanosine-3'-phosphate
  modified_base 17: mod_base = OTHER; note = 2'-O-methyladenosine-3'-phosphate
  modified_base 18: mod_base = OTHER; note = 2'-O-methyladenosine-3'-phosphate
  modified_base 19: mod_base = OTHER; note = 2'-O-methyladenosine-3'-phosphate
  modified_base 20: mod_base = OTHER; note = 2'-O-methylguanosine-3'-phosphate
  modified_base 21: mod_base = OTHER; note = 2'-O-methylcytidine-3'-phosphorothioate
  modified_base 22: mod_base = OTHER; note = 2'-O-methyladenosine-3'-phosphorothioate
  modified_base 23: mod_base = OTHER; note = 2'-O-methyladenosine
taatgtgttgcaaatgaaagcaa

SEQ ID NO: 12874 - RNA, 23 nt, synthetic construct
  source 1..23: mol_type = other RNA
  modified_base 1: mod_base = OTHER; note = 2'-O-methyluridine-3'-phosphorothioate 5'-(E)-Vinylphosphonate
  modified_base 2: mod_base = OTHER; note = 2'-deoxy-2'-fluoroadenosine-3'-phosphorothioate
  modified_base 3: mod_base = OTHER; note = 2'-O-methyladenosine-3'-phosphate
  modified_base 4: mod_base = OTHER; note = 2'-O-methyladenosine-3'-phosphate
  modified_base 5: mod_base = OTHER; note = 2'-O-methyluridine-3'-phosphate
  modified_base 6: mod_base = OTHER; note = 2'-deoxy-2'-fluoroguanosine-3'-phosphate
  modified_base 7: mod_base = OTHER; note = 2'-O-methyluridine-3'-phosphate
  modified_base 8: mod_base = OTHER; note = 2'-O-methylguanosine-3'-phosphate
  modified_base 9: mod_base = OTHER; note = 2'-O-methyluridine-3'-phosphate
  modified_base 10: mod_base = OTHER; note = 2'-O-methyluridine-3'-phosphate
  modified_base 11: mod_base = OTHER; note = 2'-O-methylguanosine-3'-phosphate
  modified_base 12: mod_base = OTHER; note = 2'-O-methylcytidine-3'-phosphate
  modified_base 13: mod_base = OTHER; note = 2'-O-methyladenosine-3'-phosphate
  modified_base 14: mod_base = OTHER; note = 2'-deoxy-2'-fluoroadenosine-3'-phosphate
  modified_base 15: mod_base = OTHER; note = 2'-O-methyladenosine-3'-phosphate
  modified_base 16: mod_base = OTHER; note = 2'-deoxy-2'-fluorouridine-3'-phosphate
  modified_base 17: mod_base = OTHER; note = 2'-O-methylguanosine-3'-phosphate
  modified_base 18: mod_base = OTHER; note = 2'-O-methyladenosine-3'-phosphate
  modified_base 19: mod_base = OTHER; note = 2'-O-methyladenosine-3'-phosphate
  modified_base 20: mod_base = OTHER; note = 2'-O-methyladenosine-3'-phosphate
  modified_base 21: mod_base = OTHER; note = 2'-O-methylguanosine-3'-phosphorothioate
  modified_base 22: mod_base = OTHER; note = 2'-O-methylcytidine-3'-phosphorothioate
  modified_base 23: mod_base = OTHER; note = 2'-O-methyladenosine
taaatgtgttgcaaatgaaagca

SEQ ID NO: 12875 - RNA, 23 nt, synthetic construct
  source 1..23: mol_type = other RNA
  modified_base 1: mod_base = OTHER; note = 2'-O-methyluridine-3'-phosphorothioate 5'-(E)-Vinylphosphonate
  modified_base 2: mod_base = OTHER; note = 2'-deoxy-2'-fluoroguanosine-3'-phosphorothioate
  modified_base 3: mod_base = OTHER; note = 2'-O-methyladenosine-3'-phosphate
  modified_base 4: mod_base = OTHER; note = 2'-O-methyluridine-3'-phosphate
  modified_base 5: mod_base = OTHER; note = 2'-O-methylguanosine-3'-phosphate
  modified_base 6: mod_base = OTHER; note = 2'-deoxy-2'-fluoroadenosine-3'-phosphate
  modified_base 7: mod_base = OTHER; note = 2'-O-methyluridine-3'-phosphate
  modified_base 8: mod_base = OTHER; note = 2'-O-methyladenosine-3'-phosphate
  modified_base 9: mod_base = OTHER; note = 2'-O-methyluridine-3'-phosphate
  modified_base 10: mod_base = OTHER; note = 2'-O-methyladenosine-3'-phosphate
  modified_base 11: mod_base = OTHER; note = 2'-O-methyluridine-3'-phosphate
  modified_base 12: mod_base = OTHER; note = 2'-O-methyluridine-3'-phosphate
  modified_base 13: mod_base = OTHER; note = 2'-O-methyluridine-3'-phosphate
  modified_base 14: mod_base = OTHER; note = 2'-deoxy-2'-fluoroadenosine-3'-phosphate
  modified_base 15: mod_base = OTHER; note = 2'-O-methylguanosine-3'-phosphate
  modified_base 16: mod_base = OTHER; note = 2'-deoxy-2'-fluoroadenosine-3'-phosphate
  modified_base 17: mod_base = OTHER; note = 2'-O-methyluridine-3'-phosphate
  modified_base 18: mod_base = OTHER; note = 2'-O-methyluridine-3'-phosphate
  modified_base 19: mod_base = OTHER; note = 2'-O-methylguanosine-3'-phosphate
  modified_base 20: mod_base = OTHER; note = 2'-O-methyluridine-3'-phosphate
  modified_base 21: mod_base = OTHER; note = 2'-O-methylcytidine-3'-phosphorothioate
  modified_base 22: mod_base = OTHER; note = 2'-O-methyluridine-3'-phosphorothioate
  modified_base 23: mod_base = OTHER; note = 2'-O-methylguanosine
tgatgatatatttagattgtctg

SEQ ID NO: 12876 - RNA, 23 nt, synthetic construct
  source 1..23: mol_type = other RNA
  modified_base 1: mod_base = OTHER; note = 2'-O-methyluridine-3'-phosphorothioate 5'-(E)-Vinylphosphonate
  modified_base 2: mod_base = OTHER; note = 2'-deoxy-2'-fluorouridine-3'-phosphorothioate
  modified_base 3: mod_base = OTHER; note = 2'-O-methylcytidine-3'-phosphate
  modified_base 4: mod_base = OTHER; note = 2'-O-methylcytidine-3'-phosphate
  modified_base 5: mod_base = OTHER; note = 2'-O-methyladenosine-3'-phosphate
  modified_base 6: mod_base = OTHER; note = 2'-deoxy-2'-fluoroadenosine-3'-phosphate
  modified_base 7: mod_base = OTHER; note = 2'-O-methyladenosine-3'-phosphate
  modified_base 8: mod_base = OTHER; note = 2'-O-methyluridine-3'-phosphate
  modified_base 9: mod_base = OTHER; note = 2'-O-methyladenosine-3'-phosphate
  modified_base 10: mod_base = OTHER; note = 2'-O-methyladenosine-3'-phosphate
  modified_base 11: mod_base = OTHER; note = 2'-O-methyladenosine-3'-phosphate
  modified_base 12: mod_base = OTHER; note = 2'-O-methylguanosine-3'-phosphate
  modified_base 13: mod_base = OTHER; note = 2'-O-methylcytidine-3'-phosphate
  modified_base 14: mod_base = OTHER; note = 2'-deoxy-2'-fluorouridine-3'-phosphate
  modified_base 15: mod_base = OTHER; note = 2'-O-methyladenosine-3'-phosphate
  modified_base 16: mod_base = OTHER; note = 2'-deoxy-2'-fluorocytidine-3'-phosphate
  modified_base 17: mod_base = OTHER; note = 2'-O-methyluridine-3'-phosphate
  modified_base 18: mod_base = OTHER; note = 2'-O-methyluridine-3'-phosphate
  modified_base 19: mod_base = OTHER; note = 2'-O-methyluridine-3'-phosphate
  modified_base 20: mod_base = OTHER; note = 2'-O-methylcytidine-3'-phosphate
  modified_base 21: mod_base = OTHER; note = 2'-O-methyluridine-3'-phosphorothioate
  modified_base 22: mod_base = OTHER; note = 2'-O-methyladenosine-3'-phosphorothioate
  modified_base 23: mod_base = OTHER; note = 2'-O-methyladenosine
ttccaaataaagctactttctaa

SEQ ID NO: 12877 - RNA, 23 nt, synthetic construct
  source 1..23: mol_type = other RNA
  modified_base 1: mod_base = OTHER; note = 2'-O-methyluridine-3'-phosphorothioate 5'-(E)-Vinylphosphonate
  modified_base 2: mod_base = OTHER; note = 2'-deoxy-2'-fluoroadenosine-3'-phosphorothioate
  modified_base 3: mod_base = OTHER; note = 2'-O-methyluridine-3'-phosphate
  modified_base 4: mod_base = OTHER; note = 2'-O-methyladenosine-3'-phosphate
  modified_base 5: mod_base = OTHER; note = 2'-O-methyluridine-3'-phosphate
  modified_base 6: mod_base = OTHER; note = 2'-deoxy-2'-fluorocytidine-3'-phosphate
  modified_base 7: mod_base = OTHER; note = 2'-O-methylcytidine-3'-phosphate
  modified_base 8: mod_base = OTHER; note = 2'-O-methyladenosine-3'-phosphate
  modified_base 9: mod_base = OTHER; note = 2'-O-methyladenosine-3'-phosphate
  modified_base 10: mod_base = OTHER; note = 2'-O-methyladenosine-3'-phosphate
  modified_base 11: mod_base = OTHER; note = 2'-O-methyluridine-3'-phosphate
  modified_base 12: mod_base = OTHER; note = 2'-O-methyladenosine-3'-phosphate
  modified_base 13: mod_base = OTHER; note = 2'-O-methyladenosine-3'-phosphate
  modified_base 14: mod_base = OTHER; note = 2'-deoxy-2'-fluoroadenosine-3'-phosphate
  modified_base 15: mod_base = OTHER; note = 2'-O-methylguanosine-3'-phosphate
  modified_base 16: mod_base = OTHER; note = 2'-deoxy-2'-fluorocytidine-3'-phosphate
  modified_base 17: mod_base = OTHER; note = 2'-O-methyluridine-3'-phosphate
  modified_base 18: mod_base = OTHER; note = 2'-O-methyladenosine-3'-phosphate
  modified_base 19: mod_base = OTHER; note = 2'-O-methylcytidine-3'-phosphate
  modified_base 20: mod_base = OTHER; note = 2'-O-methyluridine-3'-phosphate
  modified_base 21: mod_base = OTHER; note = 2'-O-methyluridine-3'-phosphorothioate
  modified_base 22: mod_base = OTHER; note = 2'-O-methyluridine-3'-phosphorothioate
  modified_base 23: mod_base = OTHER; note = 2'-O-methylcytidine
tatatccaaataaagctactttc

SEQ ID NO: 12878 - RNA, 23 nt, synthetic construct
  source 1..23: mol_type = other RNA
  modified_base 1: mod_base = OTHER; note = 2'-O-methyluridine-3'-phosphorothioate 5'-(E)-Vinylphosphonate
  modified_base 2: mod_base = OTHER; note = 2'-deoxy-2'-fluorocytidine-3'-phosphorothioate
  modified_base 3: mod_base = OTHER; note = 2'-O-methyluridine-3'-phosphate
  modified_base 4: mod_base = OTHER; note = 2'-O-methylguanosine-3'-phosphate
  modified_base 5: mod_base = OTHER; note = 2'-O-methyladenosine-3'-phosphate
  modified_base 6: mod_base = OTHER; note = 2'-deoxy-2'-fluorouridine-3'-phosphate
  modified_base 7: mod_base = OTHER; note = 2'-O-methylguanosine-3'-phosphate
  modified_base 8: mod_base = OTHER; note = 2'-O-methyladenosine-3'-phosphate
  modified_base 9: mod_base = OTHER; note = 2'-O-methyluridine-3'-phosphate
  modified_base 10: mod_base = OTHER; note = 2'-O-methyladenosine-3'-phosphate
  modified_base 11: mod_base = OTHER; note = 2'-O-methyluridine-3'-phosphate
  modified_base 12: mod_base = OTHER; note = 2'-O-methyladenosine-3'-phosphate
  modified_base 13: mod_base = OTHER; note = 2'-O-methyluridine-3'-phosphate
  modified_base 14: mod_base = OTHER; note = 2'-deoxy-2'-fluorouridine-3'-phosphate
  modified_base 15: mod_base = OTHER; note = 2'-O-methyluridine-3'-phosphate
  modified_base 16: mod_base = OTHER; note = 2'-deoxy-2'-fluoroadenosine-3'-phosphate
  modified_base 17: mod_base = OTHER; note = 2'-O-methylguanosine-3'-phosphate
  modified_base 18: mod_base = OTHER; note = 2'-O-methyladenosine-3'-phosphate
  modified_base 19: mod_base = OTHER; note = 2'-O-methyluridine-3'-phosphate
  modified_base 20: mod_base = OTHER; note = 2'-O-methyluridine-3'-phosphate
  modified_base 21: mod_base = OTHER; note = 2'-O-methylguanosine-3'-phosphorothioate
  modified_base 22: mod_base = OTHER; note = 2'-O-methyluridine-3'-phosphorothioate
  modified_base 23: mod_base = OTHER; note = 2'-O-methylcytidine
tctgatgatatatttagattgtc

SEQ ID NO: 12879 - RNA, 23 nt, synthetic construct
  source 1..23: mol_type = other RNA
  modified_base 1: mod_base = OTHER; note = 2'-O-methyluridine-3'-phosphorothioate 5'-(E)-Vinylphosphonate
  modified_base 2: mod_base = OTHER; note = 2'-deoxy-2'-fluoroadenosine-3'-phosphorothioate
  modified_base 3: mod_base = OTHER; note = 2'-O-methyluridine-3'-phosphate
  modified_base 4: mod_base = OTHER; note = 2'-O-methylcytidine-3'-phosphate
  modified_base 5: mod_base = OTHER; note = 2'-O-methyladenosine-3'-phosphate
  modified_base 6: mod_base = OTHER; note = 2'-deoxy-2'-fluorocytidine-3'-phosphate
  modified_base 7: mod_base = OTHER; note = 2'-O-methyluridine-3'-phosphate
  modified_base 8: mod_base = OTHER; note = 2'-O-methyluridine-3'-phosphate
  modified_base 9: mod_base = OTHER; note = 2'-O-methylcytidine-3'-phosphate
  modified_base 10: mod_base = OTHER; note = 2'-O-methyladenosine-3'-phosphate
  modified_base 11: mod_base = OTHER; note = 2'-O-methylcytidine-3'-phosphate
  modified_base 12: mod_base = OTHER; note = 2'-O-methyladenosine-3'-phosphate
  modified_base 13: mod_base = OTHER; note = 2'-O-methyluridine-3'-phosphate
  modified_base 14: mod_base = OTHER; note = 2'-deoxy-2'-fluoroadenosine-3'-phosphate
  modified_base 15: mod_base = OTHER; note = 2'-O-methylguanosine-3'-phosphate
  modified_base 16: mod_base = OTHER; note = 2'-deoxy-2'-fluoroguanosine-3'-phosphate
  modified_base 17: mod_base = OTHER; note = 2'-O-methylcytidine-3'-phosphate
  modified_base 18: mod_base = OTHER; note = 2'-O-methyladenosine-3'-phosphate
  modified_base 19: mod_base = OTHER; note = 2'-O-methylcytidine-3'-phosphate
  modified_base 20: mod_base = OTHER; note = 2'-O-methyluridine-3'-phosphate
  modified_base 21: mod_base = OTHER; note = 2'-O-methyluridine-3'-phosphorothioate
  modified_base 22: mod_base = OTHER; note = 2'-O-methyluridine-3'-phosphorothioate
  modified_base 23: mod_base = OTHER; note = 2'-O-methyluridine
tatcacttcacataggcactttt

SEQ ID NO: 12880 - RNA, 23 nt, synthetic construct
  source 1..23: mol_type = other RNA
  modified_base 1: mod_base = OTHER; note = 2'-O-methyluridine-3'-phosphorothioate 5'-(E)-Vinylphosphonate
  modified_base 2: mod_base = OTHER; note = 2'-deoxy-2'-fluoroguanosine-3'-phosphorothioate
  modified_base 3: mod_base = OTHER; note = 2'-O-methylcytidine-3'-phosphate
  modified_base 4: mod_base = OTHER; note = 2'-O-methyladenosine-3'-phosphate
  modified_base 5: mod_base = OTHER; note = 2'-O-methylcytidine-3'-phosphate
  modified_base 6: mod_base = OTHER; note = 2'-deoxy-2'-fluorouridine-3'-phosphate
  modified_base 7: mod_base = OTHER; note = 2'-O-methyluridine-3'-phosphate
  modified_base 8: mod_base = OTHER; note = 2'-O-methyluridine-3'-phosphate
  modified_base 9: mod_base = OTHER; note = 2'-O-methyluridine-3'-phosphate
  modified_base 10: mod_base = OTHER; note = 2'-O-methyladenosine-3'-phosphate
  modified_base 11: mod_base = OTHER; note = 2'-O-methyladenosine-3'-phosphate
  modified_base 12: mod_base = OTHER; note = 2'-O-methyladenosine-3'-phosphate
  modified_base 13: mod_base = OTHER; note = 2'-O-methyladenosine-3'-phosphate
  modified_base 14: mod_base = OTHER; note = 2'-deoxy-2'-fluoroadenosine-3'-phosphate
  modified_base 15: mod_base = OTHER; note = 2'-O-methylcytidine-3'-phosphate
  modified_base 16: mod_base = OTHER; note = 2'-deoxy-2'-fluorouridine-3'-phosphate
  modified_base 17: mod_base = OTHER; note = 2'-O-methylguanosine-3'-phosphate
  modified_base 18: mod_base = OTHER; note = 2'-O-methyladenosine-3'-phosphate
  modified_base 19: mod_base = OTHER; note = 2'-O-methyluridine-3'-phosphate
  modified_base 20: mod_base = OTHER; note = 2'-O-methylguanosine-3'-phosphate
  modified_base 21: mod_base = OTHER; note = 2'-O-methyladenosine-3'-phosphorothioate
  modified_base 22: mod_base = OTHER; note = 2'-O-methyluridine-3'-phosphorothioate
  modified_base 23: mod_base = OTHER; note = 2'-O-methyladenosine
tgcacttttaaaaactgatgata

SEQ ID NO: 12881 - RNA, 23 nt, synthetic construct
  source 1..23: mol_type = other RNA
  modified_base 1: mod_base = OTHER; note = 2'-O-methyluridine-3'-phosphorothioate 5'-(E)-Vinylphosphonate
  modified_base 2: mod_base = OTHER; note = 2'-deoxy-2'-fluoroguanosine-3'-phosphorothioate
  modified_base 3: mod_base = OTHER; note = 2'-O-methylguanosine-3'-phosphate
  modified_base 4: mod_base = OTHER; note = 2'-O-methylcytidine-3'-phosphate
  modified_base 5: mod_base = OTHER; note = 2'-O-methyladenosine-3'-phosphate
  modified_base 6: mod_base = OTHER; note = 2'-deoxy-2'-fluorocytidine-3'-phosphate
  modified_base 7: mod_base = OTHER; note = 2'-O-methyluridine-3'-phosphate
  modified_base 8: mod_base = OTHER; note = 2'-O-methyluridine-3'-phosphate
  modified_base 9: mod_base = OTHER; note = 2'-O-methyluridine-3'-phosphate
  modified_base 10: mod_base = OTHER; note = 2'-O-methyluridine-3'-phosphate
  modified_base 11: mod_base = OTHER; note = 2'-O-methyladenosine-3'-phosphate
  modified_base 12: mod_base = OTHER; note = 2'-O-methyladenosine-3'-phosphate
  modified_base 13: mod_base = OTHER; note = 2'-O-methyladenosine-3'-phosphate
  modified_base 14: mod_base = OTHER; note = 2'-deoxy-2'-fluoroadenosine-3'-phosphate
  modified_base 15: mod_base = OTHER; note = 2'-O-methyladenosine-3'-phosphate
  modified_base 16: mod_base = OTHER; note = 2'-deoxy-2'-fluorocytidine-3'-phosphate
  modified_base 17: mod_base = OTHER; note = 2'-O-methyluridine-3'-phosphate
  modified_base 18: mod_base = OTHER; note = 2'-O-methylguanosine-3'-phosphate
  modified_base 19: mod_base = OTHER; note = 2'-O-methyladenosine-3'-phosphate
  modified_base 20: mod_base = OTHER; note = 2'-O-methyluridine-3'-phosphate
  modified_base 21: mod_base = OTHER; note = 2'-O-methylguanosine-3'-phosphorothioate
  modified_base 22: mod_base = OTHER; note = 2'-O-methyladenosine-3'-phosphorothioate
  modified_base 23: mod_base = OTHER; note = 2'-O-methyluridine
tggcacttttaaaaactgatgat

SEQ ID NO: 12882 - RNA, 23 nt, synthetic construct
  source 1..23: mol_type = other RNA
  modified_base 1: mod_base = OTHER; note = 2'-O-methyluridine-3'-phosphorothioate 5'-(E)-Vinylphosphonate
  modified_base 2: mod_base = OTHER; note = 2'-deoxy-2'-fluoroadenosine-3'-phosphorothioate
  modified_base 3: mod_base = OTHER; note = 2'-O-methylguanosine-3'-phosphate
  modified_base 4: mod_base = OTHER; note = 2'-O-methylguanosine-3'-phosphate
  modified_base 5: mod_base = OTHER; note = 2'-O-methylcytidine-3'-phosphate
  modified_base 6: mod_base = OTHER; note = 2'-deoxy-2'-fluoroadenosine-3'-phosphate
  modified_base 7: mod_base = OTHER; note = 2'-O-methylcytidine-3'-phosphate
  modified_base 8: mod_base = OTHER; note = 2'-O-methyluridine-3'-phosphate
  modified_base 9: mod_base = OTHER; note = 2'-O-methyluridine-3'-phosphate
  modified_base 10: mod_base = OTHER; note = 2'-O-methyluridine-3'-phosphate
  modified_base 11: mod_base = OTHER; note = 2'-O-methyluridine-3'-phosphate
  modified_base 12: mod_base = OTHER; note = 2'-O-methyladenosine-3'-phosphate
  modified_base 13: mod_base = OTHER; note = 2'-O-methyladenosine-3'-phosphate
  modified_base 14: mod_base = OTHER; note = 2'-deoxy-2'-fluoroadenosine-3'-phosphate
  modified_base 15: mod_base = OTHER; note = 2'-O-methyladenosine-3'-phosphate
  modified_base 16: mod_base = OTHER; note = 2'-deoxy-2'-fluoroadenosine-3'-phosphate
  modified_base 17: mod_base = OTHER; note = 2'-O-methylcytidine-3'-phosphate
  modified_base 18: mod_base = OTHER; note = 2'-O-methyluridine-3'-phosphate
  modified_base 19: mod_base = OTHER; note = 2'-O-methylguanosine-3'-phosphate
  modified_base 20: mod_base = OTHER; note = 2'-O-methyladenosine-3'-phosphate
  modified_base 21: mod_base = OTHER; note = 2'-O-methyluridine-3'-phosphorothioate
  modified_base 22: mod_base = OTHER; note = 2'-O-methylguanosine-3'-phosphorothioate
  modified_base 23: mod_base = OTHER; note = 2'-O-methyladenosine
taggcacttttaaaaactgatga

SEQ ID NO: 12883 - RNA, 23 nt, synthetic construct
  source 1..23: mol_type = other RNA
  modified_base 1: mod_base = OTHER; note = 2'-O-methyluridine-3'-phosphorothioate 5'-(E)-Vinylphosphonate
  modified_base 2: mod_base = OTHER; note = 2'-deoxy-2'-fluorouridine-3'-phosphorothioate
  modified_base 3: mod_base = OTHER; note = 2'-O-methyladenosine-3'-phosphate
  modified_base 4: mod_base = OTHER; note = 2'-O-methylguanosine-3'-phosphate
  modified_base 5: mod_base = OTHER; note = 2'-O-methylguanosine-3'-phosphate
  modified_base 6: mod_base = OTHER; note = 2'-deoxy-2'-fluorocytidine-3'-phosphate
  modified_base 7: mod_base = OTHER; note = 2'-O-methyladenosine-3'-phosphate
  modified_base 8: mod_base = OTHER; note = 2'-O-methylcytidine-3'-phosphate
  modified_base 9: mod_base = OTHER; note = 2'-O-methyluridine-3'-phosphate
  modified_base 10: mod_base = OTHER; note = 2'-O-methyluridine-3'-phosphate
  modified_base 11: mod_base = OTHER; note = 2'-O-methyluridine-3'-phosphate
  modified_base 12: mod_base = OTHER; note = 2'-O-methyluridine-3'-phosphate
  modified_base 13: mod_base = OTHER; note = 2'-O-methyladenosine-3'-phosphate
  modified_base 14: mod_base = OTHER; note = 2'-deoxy-2'-fluoroadenosine-3'-phosphate
  modified_base 15: mod_base = OTHER; note = 2'-O-methyladenosine-3'-phosphate
  modified_base 16: mod_base = OTHER; note = 2'-deoxy-2'-fluoroadenosine-3'-phosphate
  modified_base 17: mod_base = OTHER; note = 2'-O-methyladenosine-3'-phosphate
  modified_base 18: mod_base = OTHER; note = 2'-O-methylcytidine-3'-phosphate
  modified_base 19: mod_base = OTHER; note = 2'-O-methyluridine-3'-phosphate
  modified_base 20: mod_base = OTHER; note = 2'-O-methylguanosine-3'-phosphate
  modified_base 21: mod_base = OTHER; note = 2'-O-methyladenosine-3'-phosphorothioate
  modified_base 22: mod_base = OTHER; note = 2'-O-methyluridine-3'-phosphorothioate
  modified_base 23: mod_base = OTHER; note = 2'-O-methylguanosine
ttaggcacttttaaaaactgatg

SEQ ID NO: 12884 - RNA, 23 nt, synthetic construct
  source 1..23: mol_type = other RNA
  modified_base 1: mod_base = OTHER; note = 2'-O-methyluridine-3'-phosphorothioate 5'-(E)-Vinylphosphonate
  modified_base 2: mod_base = OTHER; note = 2'-deoxy-2'-fluoroadenosine-3'-phosphorothioate
  modified_base 3: mod_base = OTHER; note = 2'-O-methyluridine-3'-phosphate
  modified_base 4: mod_base = OTHER; note = 2'-O-methyladenosine-3'-phosphate
  modified_base 5: mod_base = OTHER; note = 2'-O-methylguanosine-3'-phosphate
  modified_base 6: mod_base = OTHER; note = 2'-deoxy-2'-fluoroguanosine-3'-phosphate
  modified_base 7: mod_base = OTHER; note = 2'-O-methylcytidine-3'-phosphate
  modified_base 8: mod_base = OTHER; note = 2'-O-methyladenosine-3'-phosphate
  modified_base 9: mod_base = OTHER; note = 2'-O-methylcytidine-3'-phosphate
  modified_base 10: mod_base = OTHER; note = 2'-O-methyluridine-3'-phosphate
  modified_base 11: mod_base = OTHER; note = 2'-O-methyluridine-3'-phosphate
  modified_base 12: mod_base = OTHER; note = 2'-O-methyluridine-3'-phosphate
  modified_base 13: mod_base = OTHER; note = 2'-O-methyluridine-3'-phosphate
  modified_base 14: mod_base = OTHER; note = 2'-deoxy-2'-fluoroadenosine-3'-phosphate
  modified_base 15: mod_base = OTHER; note = 2'-O-methyladenosine-3'-phosphate
  modified_base 16: mod_base = OTHER; note = 2'-deoxy-2'-fluoroadenosine-3'-phosphate
  modified_base 17: mod_base = OTHER; note = 2'-O-methyladenosine-3'-phosphate
  modified_base 18: mod_base = OTHER; note = 2'-O-methyladenosine-3'-phosphate
  modified_base 19: mod_base = OTHER; note = 2'-O-methylcytidine-3'-phosphate
  modified_base 20: mod_base = OTHER; note = 2'-O-methyluridine-3'-phosphate
  modified_base 21: mod_base = OTHER; note = 2'-O-methylguanosine-3'-phosphorothioate
  modified_base 22: mod_base = OTHER; note = 2'-O-methyladenosine-3'-phosphorothioate
  modified_base 23: mod_base = OTHER; note = 2'-O-methyluridine
tataggcacttttaaaaactgat

SEQ ID NO: 12885 - RNA, 23 nt, synthetic construct
  source 1..23: mol_type = other RNA
  modified_base 1: mod_base = OTHER; note = 2'-O-methyluridine-3'-phosphorothioate 5'-(E)-Vinylphosphonate
  modified_base 2: mod_base = OTHER; note = 2'-deoxy-2'-fluorocytidine-3'-phosphorothioate
  modified_base 3: mod_base = OTHER; note = 2'-O-methyladenosine-3'-phosphate
  modified_base 4: mod_base = OTHER; note = 2'-O-methyluridine-3'-phosphate
  modified_base 5: mod_base = OTHER; note = 2'-O-methyladenosine-3'-phosphate
  modified_base 6: mod_base = OTHER; note = 2'-deoxy-2'-fluoroguanosine-3'-phosphate
  modified_base 7: mod_base = OTHER; note = 2'-O-methylguanosine-3'-phosphate
  modified_base 8: mod_base = OTHER; note = 2'-O-methylcytidine-3'-phosphate
  modified_base 9: mod_base = OTHER; note = 2'-O-methyladenosine-3'-phosphate
  modified_base 10: mod_base = OTHER; note = 2'-O-methylcytidine-3'-phosphate
  modified_base 11: mod_base = OTHER; note = 2'-O-methyluridine-3'-phosphate
  modified_base 12: mod_base = OTHER; note = 2'-O-methyluridine-3'-phosphate
  modified_base 13: mod_base = OTHER; note = 2'-O-methyluridine-3'-phosphate
  modified_base 14: mod_base = OTHER; note = 2'-deoxy-2'-fluorouridine-3'-phosphate
  modified_base 15: mod_base = OTHER; note = 2'-O-methyladenosine-3'-phosphate
  modified_base 16: mod_base = OTHER; note = 2'-deoxy-2'-fluoroadenosine-3'-phosphate
  modified_base 17: mod_base = OTHER; note = 2'-O-methyladenosine-3'-phosphate
  modified_base 18: mod_base = OTHER; note = 2'-O-methyladenosine-3'-phosphate
  modified_base 19: mod_base = OTHER; note = 2'-O-methyladenosine-3'-phosphate
  modified_base 20: mod_base = OTHER; note = 2'-O-methylcytidine-3'-phosphate
  modified_base 21: mod_base = OTHER; note = 2'-O-methyluridine-3'-phosphorothioate
  modified_base 22: mod_base = OTHER; note = 2'-O-methylguanosine-3'-phosphorothioate
  modified_base 23: mod_base = OTHER; note = 2'-O-methyladenosine
tcataggcacttttaaaaactga

SEQ ID NO: 12886 - RNA, 23 nt, synthetic construct
  source 1..23: mol_type = other RNA
  modified_base 1: mod_base = OTHER; note = 2'-O-methyluridine-3'-phosphorothioate 5'-(E)-Vinylphosphonate
  modified_base 2: mod_base = OTHER; note = 2'-deoxy-2'-fluoroadenosine-3'-phosphorothioate
  modified_base 3: mod_base = OTHER; note = 2'-O-methylcytidine-3'-phosphate
  modified_base 4: mod_base = OTHER; note = 2'-O-methyladenosine-3'-phosphate
  modified_base 5: mod_base = OTHER; note = 2'-O-methyluridine-3'-phosphate
  modified_base 6: mod_base = OTHER; note = 2'-deoxy-2'-fluoroadenosine-3'-phosphate
  modified_base 7: mod_base = OTHER; note = 2'-O-methylguanosine-3'-phosphate
  modified_base 8: mod_base = OTHER; note = 2'-O-methylguanosine-3'-phosphate
  modified_base 9: mod_base = OTHER; note = 2'-O-methylcytidine-3'-phosphate
  modified_base 10: mod_base = OTHER; note = 2'-O-methyladenosine-3'-phosphate
  modified_base 11: mod_base = OTHER; note = 2'-O-methylcytidine-3'-phosphate
  modified_base 12: mod_base = OTHER; note = 2'-O-methyluridine-3'-phosphate
  modified_base 13: mod_base = OTHER; note = 2'-O-methyluridine-3'-phosphate
  modified_base 14: mod_base = OTHER; note = 2'-deoxy-2'-fluorouridine-3'-phosphate
  modified_base 15: mod_base = OTHER; note = 2'-O-methyluridine-3'-phosphate
  modified_base 16: mod_base = OTHER; note = 2'-deoxy-2'-fluoroadenosine-3'-phosphate
  modified_base 17: mod_base = OTHER; note = 2'-O-methyladenosine-3'-phosphate
  modified_base 18: mod_base = OTHER; note = 2'-O-methyladenosine-3'-phosphate
  modified_base 19: mod_base = OTHER; note = 2'-O-methyladenosine-3'-phosphate
  modified_base 20: mod_base = OTHER; note = 2'-O-methyladenosine-3'-phosphate
  modified_base 21: mod_base = OTHER; note = 2'-O-methylcytidine-3'-phosphorothioate
  modified_base 22: mod_base = OTHER; note = 2'-O-methyluridine-3'-phosphorothioate
  modified_base 23: mod_base = OTHER; note = 2'-O-methylguanosine
tacataggcacttttaaaaactg

SEQ ID NO: 12887 - RNA, 23 nt, synthetic construct
  source 1..23: mol_type = other RNA
  modified_base 1: mod_base = OTHER; note = 2'-O-methyluridine-3'-phosphorothioate 5'-(E)-Vinylphosphonate
  modified_base 2: mod_base = OTHER; note = 2'-deoxy-2'-fluorocytidine-3'-phosphorothioate
  modified_base 3: mod_base = OTHER; note = 2'-O-methyladenosine-3'-phosphate
  modified_base 4: mod_base = OTHER; note = 2'-O-methylcytidine-3'-phosphate
  modified_base 5: mod_base = OTHER; note = 2'-O-methyladenosine-3'-phosphate
  modified_base 6: mod_base = OTHER; note = 2'-deoxy-2'-fluorouridine-3'-phosphate
  modified_base 7: mod_base = OTHER; note = 2'-O-methyladenosine-3'-phosphate
  modified_base 8: mod_base = OTHER; note = 2'-O-methylguanosine-3'-phosphate
  modified_base 9: mod_base = OTHER; note = 2'-O-methylguanosine-3'-phosphate
  modified_base 10: mod_base = OTHER; note = 2'-O-methylcytidine-3'-phosphate
  modified_base 11: mod_base = OTHER; note = 2'-O-methyladenosine-3'-phosphate
  modified_base 12: mod_base = OTHER; note = 2'-O-methylcytidine-3'-phosphate
  modified_base 13: mod_base = OTHER; note = 2'-O-methyluridine-3'-phosphate
  modified_base 14: mod_base = OTHER; note = 2'-deoxy-2'-fluorouridine-3'-phosphate
  modified_base 15: mod_base = OTHER; note = 2'-O-methyluridine-3'-phosphate
  modified_base 16: mod_base = OTHER; note = 2'-deoxy-2'-fluorouridine-3'-phosphate
  modified_base 17: mod_base = OTHER; note = 2'-O-methyladenosine-3'-phosphate
  modified_base 18: mod_base = OTHER; note = 2'-O-methyladenosine-3'-phosphate
  modified_base 19: mod_base = OTHER; note = 2'-O-methyladenosine-3'-phosphate
  modified_base 20: mod_base = OTHER; note = 2'-O-methyladenosine-3'-phosphate
  modified_base 21: mod_base = OTHER; note = 2'-O-methyladenosine-3'-phosphorothioate
  modified_base 22: mod_base = OTHER; note = 2'-O-methylcytidine-3'-phosphorothioate
  modified_base 23: mod_base = OTHER; note = 2'-O-methyluridine
tcacataggcacttttaaaaact

SEQ ID NO: 12888 - RNA, 23 nt, synthetic construct
  source 1..23: mol_type = other RNA
  modified_base 1: mod_base = OTHER; note = 2'-O-methyluridine-3'-phosphorothioate 5'-(E)-Vinylphosphonate
  modified_base 2: mod_base = OTHER; note = 2'-deoxy-2'-fluoroadenosine-3'-phosphorothioate
  modified_base 3: mod_base = OTHER; note = 2'-O-methyladenosine-3'-phosphate
  modified_base 4: mod_base = OTHER; note = 2'-O-methyluridine-3'-phosphate
  modified_base 5: mod_base = OTHER; note = 2'-O-methylcytidine-3'-phosphate
  modified_base 6: mod_base = OTHER; note = 2'-deoxy-2'-fluoroadenosine-3'-phosphate
  modified_base 7: mod_base = OTHER; note = 2'-O-methylcytidine-3'-phosphate
  modified_base 8: mod_base = OTHER; note = 2'-O-methyluridine-3'-phosphate
  modified_base 9: mod_base = OTHER; note = 2'-O-methyluridine-3'-phosphate
  modified_base 10: mod_base = OTHER; note = 2'-O-methylcytidine-3'-phosphate
  modified_base 11: mod_base = OTHER; note = 2'-O-methyladenosine-3'-phosphate
  modified_base 12: mod_base = OTHER; note = 2'-O-methylcytidine-3'-phosphate
  modified_base 13: mod_base = OTHER; note = 2'-O-methyladenosine-3'-phosphate
  modified_base 14: mod_base = OTHER; note = 2'-deoxy-2'-fluorouridine-3'-phosphate
  modified_base 15: mod_base = OTHER; note = 2'-O-methyladenosine-3'-phosphate
  modified_base 16: mod_base = OTHER; note = 2'-deoxy-2'-fluoroguanosine-3'-phosphate
  modified_base 17: mod_base = OTHER; note = 2'-O-methylguanosine-3'-phosphate
  modified_base 18: mod_base = OTHER; note = 2'-O-methylcytidine-3'-phosphate
  modified_base 19: mod_base = OTHER; note = 2'-O-methyladenosine-3'-phosphate
  modified_base 20: mod_base = OTHER; note = 2'-O-methylcytidine-3'-phosphate
  modified_base 21: mod_base = OTHER; note = 2'-O-methyluridine-3'-phosphorothioate
  modified_base 22: mod_base = OTHER; note = 2'-O-methyluridine-3'-phosphorothioate
  modified_base 23: mod_base = OTHER; note = 2'-O-methyluridine
taatcacttcacataggcacttt

SEQ ID NO: 12889 - RNA, 23 nt, synthetic construct
  source 1..23: mol_type = other RNA
  modified_base 1: mod_base = OTHER; note = 2'-O-methyluridine-3'-phosphorothioate 5'-(E)-Vinylphosphonate
  modified_base 2: mod_base = OTHER; note = 2'-deoxy-2'-fluoroadenosine-3'-phosphorothioate
  modified_base 3: mod_base = OTHER; note = 2'-O-methyladenosine-3'-phosphate
  modified_base 4: mod_base = OTHER; note = 2'-O-methyladenosine-3'-phosphate
  modified_base 5: mod_base = OTHER; note = 2'-O-methyluridine-3'-phosphate
  modified_base 6: mod_base = OTHER; note = 2'-deoxy-2'-fluorocytidine-3'-phosphate
  modified_base 7: mod_base = OTHER; note = 2'-O-methyladenosine-3'-phosphate
  modified_base 8: mod_base = OTHER; note = 2'-O-methylcytidine-3'-phosphate
  modified_base 9: mod_base = OTHER; note = 2'-O-methyluridine-3'-phosphate
  modified_base 10: mod_base = OTHER; note = 2'-O-methyluridine-3'-phosphate
  modified_base 11: mod_base = OTHER; note = 2'-O-methylcytidine-3'-phosphate
  modified_base 12: mod_base = OTHER; note = 2'-O-methyladenosine-3'-phosphate
  modified_base 13: mod_base = OTHER; note = 2'-O-methylcytidine-3'-phosphate
  modified_base 14: mod_base = OTHER; note = 2'-deoxy-2'-fluoroadenosine-3'-phosphate
  modified_base 15: mod_base = OTHER; note = 2'-O-methyluridine-3'-phosphate
  modified_base 16: mod_base = OTHER; note = 2'-deoxy-2'-fluoroadenosine-3'-phosphate
  modified_base 17: mod_base = OTHER; note = 2'-O-methylguanosine-3'-phosphate
  modified_base 18: mod_base = OTHER; note = 2'-O-methylguanosine-3'-phosphate
  modified_base 19: mod_base = OTHER; note = 2'-O-methylcytidine-3'-phosphate
  modified_base 20: mod_base = OTHER; note = 2'-O-methyladenosine-3'-phosphate
  modified_base 21: mod_base = OTHER; note = 2'-O-methylcytidine-3'-phosphorothioate
  modified_base 22: mod_base = OTHER; note = 2'-O-methyluridine-3'-phosphorothioate
  modified_base 23: mod_base = OTHER; note = 2'-O-methyluridine
taaatcacttcacataggcactt

SEQ ID NO: 12890 - RNA, 23 nt, synthetic construct
  source 1..23: mol_type = other RNA
  modified_base 1: mod_base = OTHER; note = 2'-O-methyluridine-3'-phosphorothioate 5'-(E)-Vinylphosphonate
  modified_base 2: mod_base = OTHER; note = 2'-deoxy-2'-fluoroadenosine-3'-phosphorothioate
  modified_base 3: mod_base = OTHER; note = 2'-O-methyladenosine-3'-phosphate
  modified_base 4: mod_base = OTHER; note = 2'-O-methyladenosine-3'-phosphate
  modified_base 5: mod_base = OTHER; note = 2'-O-methyladenosine-3'-phosphate
  modified_base 6: mod_base = OTHER; note = 2'-deoxy-2'-fluorouridine-3'-phosphate
  modified_base 7: mod_base = OTHER; note = 2'-O-methylcytidine-3'-phosphate
  modified_base 8: mod_base = OTHER; note = 2'-O-methyladenosine-3'-phosphate
  modified_base 9: mod_base = OTHER; note = 2'-O-methylcytidine-3'-phosphate
  modified_base 10: mod_base = OTHER; note = 2'-O-methyluridine-3'-phosphate
  modified_base 11: mod_base = OTHER; note = 2'-O-methyluridine-3'-phosphate
  modified_base 12: mod_base = OTHER; note = 2'-O-methylcytidine-3'-phosphate
  modified_base 13: mod_base = OTHER; note = 2'-O-methyladenosine-3'-phosphate
  modified_base 14: mod_base = OTHER; note = 2'-deoxy-2'-fluorocytidine-3'-phosphate
  modified_base 15: mod_base = OTHER; note = 2'-O-methyladenosine-3'-phosphate
  modified_base 16: mod_base = OTHER; note = 2'-deoxy-2'-fluorouridine-3'-phosphate
  modified_base 17: mod_base = OTHER; note = 2'-O-methyladenosine-3'-phosphate
  modified_base 18: mod_base = OTHER; note = 2'-O-methylguanosine-3'-phosphate
  modified_base 19: mod_base = OTHER; note = 2'-O-methylguanosine-3'-phosphate
  modified_base 20: mod_base = OTHER; note = 2'-O-methylcytidine-3'-phosphate
  modified_base 21: mod_base = OTHER; note = 2'-O-methyladenosine-3'-phosphorothioate
  modified_base 22: mod_base = OTHER; note = 2'-O-methylcytidine-3'-phosphorothioate
  modified_base 23: mod_base = OTHER; note = 2'-O-methyluridine
taaaatcacttcacataggcact

SEQ ID NO: 12891 - RNA, 23 nt, synthetic construct
  source 1..23: mol_type = other RNA
  modified_base 1: mod_base = OTHER; note = 2'-O-methyluridine-3'-phosphorothioate 5'-(E)-Vinylphosphonate
  modified_base 2: mod_base = OTHER; note = 2'-deoxy-2'-fluoroadenosine-3'-phosphorothioate
  modified_base 3: mod_base = OTHER; note = 2'-O-methyladenosine-3'-phosphate
  modified_base 4: mod_base = OTHER; note = 2'-O-methyladenosine-3'-phosphate
  modified_base 5: mod_base = OTHER; note = 2'-O-methyladenosine-3'-phosphate
  modified_base 6: mod_base = OTHER; note = 2'-deoxy-2'-fluoroadenosine-3'-phosphate
  modified_base 7: mod_base = OTHER; note = 2'-O-methyluridine-3'-phosphate
  modified_base 8: mod_base = OTHER; note = 2'-O-methylcytidine-3'-phosphate
  modified_base 9: mod_base = OTHER; note = 2'-O-methyladenosine-3'-phosphate
  modified_base 10: mod_base = OTHER; note = 2'-O-methylcytidine-3'-phosphate
  modified_base 11: mod_base = OTHER; note = 2'-O-methyluridine-3'-phosphate
  modified_base 12: mod_base = OTHER; note = 2'-O-methyluridine-3'-phosphate
  modified_base 13: mod_base = OTHER; note = 2'-O-methylcytidine-3'-phosphate
  modified_base 14: mod_base = OTHER; note = 2'-deoxy-2'-fluoroadenosine-3'-phosphate
  modified_base 15: mod_base = OTHER; note = 2'-O-methylcytidine-3'-phosphate
  modified_base 16: mod_base = OTHER; note = 2'-deoxy-2'-fluoroadenosine-3'-phosphate
  modified_base 17: mod_base = OTHER; note = 2'-O-methyluridine-3'-phosphate
  modified_base 18: mod_base = OTHER; note = 2'-O-methyladenosine-3'-phosphate
  modified_base 19: mod_base = OTHER; note = 2'-O-methylguanosine-3'-phosphate
  modified_base 20: mod_base = OTHER; note = 2'-O-methylguanosine-3'-phosphate
  modified_base 21: mod_base = OTHER; note = 2'-O-methylcytidine-3'-phosphorothioate
  modified_base 22: mod_base = OTHER; note = 2'-O-methyladenosine-3'-phosphorothioate
  modified_base 23: mod_base = OTHER; note = 2'-O-methylcytidine
taaaaatcacttcacataggcac

SEQ ID NO: 12892 - RNA, 23 nt, synthetic construct
  source 1..23: mol_type = other RNA
  modified_base 1: mod_base = OTHER; note = 2'-O-methyluridine-3'-phosphorothioate 5'-(E)-Vinylphosphonate
  modified_base 2: mod_base = OTHER; note = 2'-deoxy-2'-fluorouridine-3'-phosphorothioate
  modified_base 3: mod_base = OTHER; note = 2'-O-methyladenosine-3'-phosphate
  modified_base 4: mod_base = OTHER; note = 2'-O-methyladenosine-3'-phosphate
  modified_base 5: mod_base = OTHER; note = 2'-O-methyladenosine-3'-phosphate
  modified_base 6: mod_base = OTHER; note = 2'-deoxy-2'-fluoroadenosine-3'-phosphate
  modified_base 7: mod_base = OTHER; note = 2'-O-methyladenosine-3'-phosphate
  modified_base 8: mod_base = OTHER; note = 2'-O-methyluridine-3'-phosphate
  modified_base 9: mod_base = OTHER; note = 2'-O-methylcytidine-3'-phosphate
  modified_base 10: mod_base = OTHER; note = 2'-O-methyladenosine-3'-phosphate
  modified_base 11: mod_base = OTHER; note = 2'-O-methylcytidine-3'-phosphate
  modified_base 12: mod_base = OTHER; note = 2'-O-methyluridine-3'-phosphate
  modified_base 13: mod_base = OTHER; note = 2'-O-methyluridine-3'-phosphate
  modified_base 14: mod_base = OTHER; note = 2'-deoxy-2'-fluorocytidine-3'-phosphate
  modified_base 15: mod_base = OTHER; note = 2'-O-methyladenosine-3'-phosphate
  modified_base 16: mod_base = OTHER; note = 2'-deoxy-2'-fluorocytidine-3'-phosphate
  modified_base 17: mod_base = OTHER; note = 2'-O-methyladenosine-3'-phosphate
  modified_base 18: mod_base = OTHER; note = 2'-O-methyluridine-3'-phosphate
  modified_base 19: mod_base = OTHER; note = 2'-O-methyladenosine-3'-phosphate
  modified_base 20: mod_base = OTHER; note = 2'-O-methylguanosine-3'-phosphate
  modified_base 21: mod_base = OTHER; note = 2'-O-methylguanosine-3'-phosphorothioate
  modified_base 22: mod_base = OTHER; note = 2'-O-methylcytidine-3'-phosphorothioate
  modified_base 23: mod_base = OTHER; note = 2'-O-methyladenosine
ttaaaaatcacttcacataggca

SEQ ID NO: 12893 - RNA, 23 nt, synthetic construct
  source 1..23: mol_type = other RNA
  modified_base 1: mod_base = OTHER; note = 2'-O-methyluridine-3'-phosphorothioate 5'-(E)-Vinylphosphonate
  modified_base 2: mod_base = OTHER; note = 2'-deoxy-2'-fluorouridine-3'-phosphorothioate
  modified_base 3: mod_base = OTHER; note = 2'-O-methyluridine-3'-phosphate
  modified_base 4: mod_base = OTHER; note = 2'-O-methyladenosine-3'-phosphate
  modified_base 5: mod_base = OTHER; note = 2'-O-methyladenosine-3'-phosphate
  modified_base 6: mod_base = OTHER; note = 2'-deoxy-2'-fluoroadenosine-3'-phosphate
  modified_base 7: mod_base = OTHER; note = 2'-O-methyladenosine-3'-phosphate
  modified_base 8: mod_base = OTHER; note = 2'-O-methyladenosine-3'-phosphate
  modified_base 9: mod_base = OTHER; note = 2'-O-methyluridine-3'-phosphate
  modified_base 10: mod_base = OTHER; note = 2'-O-methylcytidine-3'-phosphate
  modified_base 11: mod_base = OTHER; note = 2'-O-methyladenosine-3'-phosphate
  modified_base 12: mod_base = OTHER; note = 2'-O-methylcytidine-3'-phosphate
  modified_base 13: mod_base = OTHER; note = 2'-O-methyluridine-3'-phosphate
  modified_base 14: mod_base = OTHER; note = 2'-deoxy-2'-fluorouridine-3'-phosphate
  modified_base 15: mod_base = OTHER; note = 2'-O-methylcytidine-3'-phosphate
  modified_base 16: mod_base = OTHER; note = 2'-deoxy-2'-fluoroadenosine-3'-phosphate
  modified_base 17: mod_base = OTHER; note = 2'-O-methylcytidine-3'-phosphate
  modified_base 18: mod_base = OTHER; note = 2'-O-methyladenosine-3'-phosphate
  modified_base 19: mod_base = OTHER; note = 2'-O-methyluridine-3'-phosphate
  modified_base 20: mod_base = OTHER; note = 2'-O-methyladenosine-3'-phosphate
  modified_base 21: mod_base = OTHER; note = 2'-O-methylguanosine-3'-phosphorothioate
  modified_base 22: mod_base = OTHER; note = 2'-O-methylguanosine-3'-phosphorothioate
  modified_base 23: mod_base = OTHER; note = 2'-O-methylcytidine
tttaaaaatcacttcacataggc

SEQ ID NO: 12894 - RNA, 23 nt, synthetic construct
  source 1..23: mol_type = other RNA
  modified_base 1: mod_base = OTHER; note = 2'-O-methyluridine-3'-phosphorothioate 5'-(E)-Vinylphosphonate
  modified_base 2: mod_base = OTHER; note = 2'-deoxy-2'-fluorouridine-3'-phosphorothioate
  modified_base 3: mod_base = OTHER; note = 2'-O-methyluridine-3'-phosphate
  modified_base 4: mod_base = OTHER; note = 2'-O-methyluridine-3'-phosphate
  modified_base 5: mod_base = OTHER; note = 2'-O-methyladenosine-3'-phosphate
  modified_base 6: mod_base = OTHER; note = 2'-deoxy-2'-fluoroadenosine-3'-phosphate
  modified_base 7: mod_base = OTHER; note = 2'-O-methyladenosine-3'-phosphate
  modified_base 8: mod_base = OTHER; note = 2'-O-methyladenosine-3'-phosphate
  modified_base 9: mod_base = OTHER; note = 2'-O-methyladenosine-3'-phosphate
  modified_base 10: mod_base = OTHER; note = 2'-O-methyluridine-3'-phosphate
  modified_base 11: mod_base = OTHER; note = 2'-O-methylcytidine-3'-phosphate
  modified_base 12: mod_base = OTHER; note = 2'-O-methyladenosine-3'-phosphate
  modified_base 13: mod_base = OTHER; note = 2'-O-methylcytidine-3'-phosphate
  modified_base 14: mod_base = OTHER; note = 2'-deoxy-2'-fluorouridine-3'-phosphate
  modified_base 15: mod_base = OTHER; note = 2'-O-methyluridine-3'-phosphate
  modified_base 16: mod_base = OTHER; note = 2'-deoxy-2'-fluorocytidine-3'-phosphate
  modified_base 17: mod_base = OTHER; note = 2'-O-methyladenosine-3'-phosphate
  modified_base 18: mod_base = OTHER; note = 2'-O-methylcytidine-3'-phosphate
  modified_base 19: mod_base = OTHER; note = 2'-O-methyladenosine-3'-phosphate
  modified_base 20: mod_base = OTHER; note = 2'-O-methyluridine-3'-phosphate
  modified_base 21: mod_base = OTHER; note = 2'-O-methyladenosine-3'-phosphorothioate
  modified_base 22: mod_base = OTHER; note = 2'-O-methylguanosine-3'-phosphorothioate
  modified_base 23: mod_base = OTHER; note = 2'-O-methylguanosine
ttttaaaaatcacttcacatagg

SEQ ID NO: 12895 - RNA, 23 nt, synthetic construct
  source 1..23: mol_type = other RNA
  modified_base 1: mod_base = OTHER; note = 2'-O-methyluridine-3'-phosphorothioate 5'-(E)-Vinylphosphonate
  modified_base 2: mod_base = OTHER; note = 2'-deoxy-2'-fluorocytidine-3'-phosphorothioate
  modified_base 3: mod_base = OTHER; note = 2'-O-methyluridine-3'-phosphate
  modified_base 4: mod_base = OTHER; note = 2'-O-methylcytidine-3'-phosphate
  modified_base 5: mod_base = OTHER; note = 2'-O-methyluridine-3'-phosphate
  modified_base 6: mod_base = OTHER; note = 2'-deoxy-2'-fluorouridine-3'-phosphate
  modified_base 7: mod_base = OTHER; note = 2'-O-methyluridine-3'-phosphate
  modified_base 8: mod_base = OTHER; note = 2'-O-methyluridine-3'-phosphate
  modified_base 9: mod_base = OTHER; note = 2'-O-methyluridine-3'-phosphate
  modified_base 10: mod_base = OTHER; note = 2'-O-methyladenosine-3'-phosphate
  modified_base 11: mod_base = OTHER; note = 2'-O-methyladenosine-3'-phosphate
  modified_base 12: mod_base = OTHER; note = 2'-O-methyladenosine-3'-phosphate
  modified_base 13: mod_base = OTHER; note = 2'-O-methyladenosine-3'-phosphate
  modified_base 14: mod_base = OTHER; note = 2'-deoxy-2'-fluoroadenosine-3'-phosphate
  modified_base 15: mod_base = OTHER; note = 2'-O-methyluridine-3'-phosphate
  modified_base 16: mod_base = OTHER; note = 2'-deoxy-2'-fluorocytidine-3'-phosphate
  modified_base 17: mod_base = OTHER; note = 2'-O-methyladenosine-3'-phosphate
  modified_base 18: mod_base = OTHER; note = 2'-O-methylcytidine-3'-phosphate
  modified_base 19: mod_base = OTHER; note = 2'-O-methyluridine-3'-phosphate
  modified_base 20: mod_base = OTHER; note = 2'-O-methyluridine-3'-phosphate
  modified_base 21: mod_base = OTHER; note = 2'-O-methylcytidine-3'-phosphorothioate
  modified_base 22: mod_base = OTHER; note = 2'-O-methyladenosine-3'-phosphorothioate
  modified_base 23: mod_base = OTHER; note = 2'-O-methylcytidine
tctctttttaaaaatcacttcac

SEQ ID NO: 12896 - RNA, 23 nt, synthetic construct
  source 1..23: mol_type = other RNA
  modified_base 1: mod_base = OTHER; note = 2'-O-methyluridine-3'-phosphorothioate 5'-(E)-Vinylphosphonate
  modified_base 2: mod_base = OTHER; note = 2'-deoxy-2'-fluoroguanosine-3'-phosphorothioate
  modified_base 3: mod_base = OTHER; note = 2'-O-methylcytidine-3'-phosphate
  modified_base 4: mod_base = OTHER; note = 2'-O-methyluridine-3'-phosphate
  modified_base 5: mod_base = OTHER; note = 2'-O-methylcytidine-3'-phosphate
  modified_base 6: mod_base = OTHER; note = 2'-deoxy-2'-fluorouridine-3'-phosphate
  modified_base 7: mod_base = OTHER; note = 2'-O-methyluridine-3'-phosphate
  modified_base 8: mod_base = OTHER; note = 2'-O-methyluridine-3'-phosphate
  modified_base 9: mod_base = OTHER; note = 2'-O-methyluridine-3'-phosphate
  modified_base 10: mod_base = OTHER; note = 2'-O-methyluridine-3'-phosphate
  modified_base 11: mod_base = OTHER; note = 2'-O-methyladenosine-3'-phosphate
  modified_base 12: mod_base = OTHER; note = 2'-O-methyladenosine-3'-phosphate
  modified_base 13: mod_base = OTHER; note = 2'-O-methyladenosine-3'-phosphate
  modified_base 14: mod_base = OTHER; note = 2'-deoxy-2'-fluoroadenosine-3'-phosphate
  modified_base 15: mod_base = OTHER; note = 2'-O-methyladenosine-3'-phosphate
  modified_base 16: mod_base = OTHER; note = 2'-deoxy-2'-fluorouridine-3'-phosphate
  modified_base 17: mod_base = OTHER; note = 2'-O-methylcytidine-3'-phosphate
  modified_base 18: mod_base = OTHER; note = 2'-O-methyladenosine-3'-phosphate
  modified_base 19: mod_base = OTHER; note = 2'-O-methylcytidine-3'-phosphate
  modified_base 20: mod_base = OTHER; note = 2'-O-methyluridine-3'-phosphate
  modified_base 21: mod_base = OTHER; note = 2'-O-methyluridine-3'-phosphorothioate
  modified_base 22: mod_base = OTHER; note = 2'-O-methylcytidine-3'-phosphorothioate
  modified_base 23: mod_base = OTHER; note = 2'-O-methyladenosine
tgctctttttaaaaatcacttca

SEQ ID NO: 12897 - RNA, 23 nt, synthetic construct
  source 1..23: mol_type = other RNA
  modified_base 1: mod_base = OTHER; note = 2'-O-methyluridine-3'-phosphorothioate 5'-(E)-Vinylphosphonate
  modified_base 2: mod_base = OTHER; note = 2'-deoxy-2'-fluorouridine-3'-phosphorothioate
  modified_base 3: mod_base = OTHER; note = 2'-O-methyladenosine-3'-phosphate
  modified_base 4: mod_base = OTHER; note = 2'-O-methylguanosine-3'-phosphate
  modified_base 5: mod_base = OTHER; note = 2'-O-methylguanosine-3'-phosphate
  modified_base 6: mod_base = OTHER; note = 2'-deoxy-2'-fluorocytidine-3'-phosphate
  modified_base 7: mod_base = OTHER; note = 2'-O-methyluridine-3'-phosphate
  modified_base 8: mod_base = OTHER; note = 2'-O-methylcytidine-3'-phosphate
  modified_base 9: mod_base = OTHER; note = 2'-O-methyluridine-3'-phosphate
  modified_base 10: mod_base = OTHER; note = 2'-O-methyluridine-3'-phosphate
  modified_base 11: mod_base = OTHER; note = 2'-O-methyluridine-3'-phosphate
  modified_base 12: mod_base = OTHER; note = 2'-O-methyluridine-3'-phosphate
  modified_base 13: mod_base = OTHER; note = 2'-O-methyluridine-3'-phosphate
  modified_base 14: mod_base = OTHER; note = 2'-deoxy-2'-fluoroadenosine-3'-phosphate
  modified_base 15: mod_base = OTHER; note = 2'-O-methyladenosine-3'-phosphate
  modified_base 16: mod_base = OTHER; note = 2'-deoxy-2'-fluoroadenosine-3'-phosphate
  modified_base 17: mod_base = OTHER; note = 2'-O-methyladenosine-3'-phosphate
  modified_base 18: mod_base = OTHER; note = 2'-O-methyladenosine-3'-phosphate
  modified_base 19: mod_base = OTHER; note = 2'-O-methyluridine-3'-phosphate
  modified_base 20: mod_base = OTHER; note = 2'-O-methylcytidine-3'-phosphate
  modified_base 21: mod_base = OTHER; note = 2'-O-methyladenosine-3'-phosphorothioate
  modified_base 22: mod_base = OTHER; note = 2'-O-methylcytidine-3'-phosphorothioate
  modified_base 23: mod_base = OTHER; note = 2'-O-methyluridine
ttaggctctttttaaaaatcact

SEQ ID NO: 12898 - RNA, 23 nt, synthetic construct
  source 1..23: mol_type = other RNA
  modified_base 1: mod_base = OTHER; note = 2'-O-methyluridine-3'-phosphorothioate 5'-(E)-Vinylphosphonate
  modified_base 2: mod_base = OTHER; note = 2'-deoxy-2'-fluoroadenosine-3'-phosphorothioate
  modified_base 3: mod_base = OTHER; note = 2'-O-methyluridine-3'-phosphate
  modified_base 4: mod_base = OTHER; note = 2'-O-methyladenosine-3'-phosphate
  modified_base 5: mod_base = OTHER; note = 2'-O-methylguanosine-3'-phosphate
  modified_base 6: mod_base = OTHER; note = 2'-deoxy-2'-fluoroguanosine-3'-phosphate
  modified_base 7: mod_base = OTHER; note = 2'-O-methylcytidine-3'-phosphate
  modified_base 8: mod_base = OTHER; note = 2'-O-methyluridine-3'-phosphate
  modified_base 9: mod_base = OTHER; note = 2'-O-methylcytidine-3'-phosphate
  modified_base 10: mod_base = OTHER; note = 2'-O-methyluridine-3'-phosphate
  modified_base 11: mod_base = OTHER; note = 2'-O-methyluridine-3'-phosphate
  modified_base 12: mod_base = OTHER; note = 2'-O-methyluridine-3'-phosphate
  modified_base 13: mod_base = OTHER; note = 2'-O-methyluridine-3'-phosphate
  modified_base 14: mod_base = OTHER; note = 2'-deoxy-2'-fluorouridine-3'-phosphate
  modified_base 15: mod_base = OTHER; note = 2'-O-methyladenosine-3'-phosphate
  modified_base 16: mod_base = OTHER; note = 2'-deoxy-2'-fluoroadenosine-3'-phosphate
  modified_base 17: mod_base = OTHER; note = 2'-O-methyladenosine-3'-phosphate
  modified_base 18: mod_base = OTHER; note = 2'-O-methyladenosine-3'-phosphate
  modified_base 19: mod_base = OTHER; note = 2'-O-methyladenosine-3'-phosphate
  modified_base 20: mod_base = OTHER; note = 2'-O-methyluridine-3'-phosphate
  modified_base 21: mod_base = OTHER; note = 2'-O-methylcytidine-3'-phosphorothioate
  modified_base 22: mod_base = OTHER; note = 2'-O-methyladenosine-3'-phosphorothioate
  modified_base 23: mod_base = OTHER; note = 2'-O-methylcytidine
tataggctctttttaaaaatcac

SEQ ID NO: 12899 - RNA, 23 nt, synthetic construct
  source 1..23: mol_type = other RNA
  modified_base 1: mod_base = OTHER; note = 2'-O-methyluridine-3'-phosphorothioate 5'-(E)-Vinylphosphonate
  modified_base 2: mod_base = OTHER; note = 2'-deoxy-2'-fluorocytidine-3'-phosphorothioate
  modified_base 3: mod_base = OTHER; note = 2'-O-methyladenosine-3'-phosphate
  modified_base 4: mod_base = OTHER; note = 2'-O-methyluridine-3'-phosphate
  modified_base 5: mod_base = OTHER; note = 2'-O-methyladenosine-3'-phosphate
  modified_base 6: mod_base = OTHER; note = 2'-deoxy-2'-fluoroguanosine-3'-phosphate
  modified_base 7: mod_base = OTHER; note = 2'-O-methylguanosine-3'-phosphate
  modified_base 8: mod_base = OTHER; note = 2'-O-methylcytidine-3'-phosphate
  modified_base 9: mod_base = OTHER; note = 2'-O-methyluridine-3'-phosphate
  modified_base 10: mod_base = OTHER; note = 2'-O-methylcytidine-3'-phosphate
  modified_base 11: mod_base = OTHER; note = 2'-O-methyluridine-3'-phosphate
  modified_base 12: mod_base = OTHER; note = 2'-O-methyluridine-3'-phosphate
  modified_base 13: mod_base = OTHER; note = 2'-O-methyluridine-3'-phosphate
  modified_base 14: mod_base = OTHER; note = 2'-deoxy-2'-fluorouridine-3'-phosphate
  modified_base 15: mod_base = OTHER; note = 2'-O-methyluridine-3'-phosphate
  modified_base 16: mod_base = OTHER; note = 2'-deoxy-2'-fluoroadenosine-3'-phosphate
  modified_base 17: mod_base = OTHER; note = 2'-O-methyladenosine-3'-phosphate
  modified_base 18: mod_base = OTHER; note = 2'-O-methyladenosine-3'-phosphate
  modified_base 19: mod_base = OTHER; note = 2'-O-methyladenosine-3'-phosphate
  modified_base 20: mod_base = OTHER; note = 2'-O-methyladenosine-3'-phosphate
  modified_base 21: mod_base = OTHER; note = 2'-O-methyluridine-3'-phosphorothioate
  modified_base 22: mod_base = OTHER; note = 2'-O-methylcytidine-3'-phosphorothioate
  modified_base 23: mod_base = OTHER; note = 2'-O-methyladenosine
tcataggctctttttaaaaatca

SEQ ID NO: 12900 - RNA, 23 nt, synthetic construct
  source 1..23: mol_type = other RNA
  modified_base 1: mod_base = OTHER; note = 2'-O-methyluridine-3'-phosphorothioate 5'-(E)-Vinylphosphonate
  modified_base 2: mod_base = OTHER; note = 2'-deoxy-2'-fluoroadenosine-3'-phosphorothioate
  modified_base 3: mod_base = OTHER; note = 2'-O-methylcytidine-3'-phosphate
  modified_base 4: mod_base = OTHER; note = 2'-O-methyladenosine-3'-phosphate
  modified_base 5: mod_base = OTHER; note = 2'-O-methyluridine-3'-phosphate
  modified_base 6: mod_base = OTHER; note = 2'-deoxy-2'-fluoroadenosine-3'-phosphate
  modified_base 7: mod_base = OTHER; note = 2'-O-methylguanosine-3'-phosphate
  modified_base 8: mod_base = OTHER; note = 2'-O-methylguanosine-3'-phosphate
  modified_base 9: mod_base = OTHER; note = 2'-O-methylcytidine-3'-phosphate
  modified_base 10: mod_base = OTHER; note = 2'-O-methyluridine-3'-phosphate
  modified_base 11: mod_base = OTHER; note = 2'-O-methylcytidine-3'-phosphate
  modified_base 12: mod_base = OTHER; note = 2'-O-methyluridine-3'-phosphate
  modified_base 13: mod_base = OTHER; note = 2'-O-methyluridine-3'-phosphate
  modified_base 14: mod_base = OTHER; note = 2'-deoxy-2'-fluorouridine-3'-phosphate
  modified_base 15: mod_base = OTHER; note = 2'-O-methyluridine-3'-phosphate
  modified_base 16: mod_base = OTHER; note = 2'-deoxy-2'-fluorouridine-3'-phosphate
  modified_base 17: mod_base = OTHER; note = 2'-O-methyladenosine-3'-phosphate
  modified_base 18: mod_base = OTHER; note = 2'-O-methyladenosine-3'-phosphate
  modified_base 19: mod_base = OTHER; note = 2'-O-methyladenosine-3'-phosphate
  modified_base 20: mod_base = OTHER; note = 2'-O-methyladenosine-3'-phosphate
  modified_base 21: mod_base = OTHER; note = 2'-O-methyladenosine-3'-phosphorothioate
  modified_base 22: mod_base = OTHER; note = 2'-O-methyluridine-3'-phosphorothioate
  modified_base 23: mod_base = OTHER; note = 2'-O-methylcytidine
tacataggctctttttaaaaatc

SEQ ID NO: 12901 - RNA, 23 nt, synthetic construct
  source 1..23: mol_type = other RNA
  modified_base 1: mod_base = OTHER; note = 2'-O-methyluridine-3'-phosphorothioate 5'-(E)-Vinylphosphonate
  modified_base 2: mod_base = OTHER; note = 2'-deoxy-2'-fluorocytidine-3'-phosphorothioate
  modified_base 3: mod_base = OTHER; note = 2'-O-methyladenosine-3'-phosphate
  modified_base 4: mod_base = OTHER; note = 2'-O-methylcytidine-3'-phosphate
  modified_base 5: mod_base = OTHER; note = 2'-O-methyladenosine-3'-phosphate
  modified_base 6: mod_base = OTHER; note = 2'-deoxy-2'-fluorouridine-3'-phosphate
  modified_base 7: mod_base = OTHER; note = 2'-O-methyladenosine-3'-phosphate
  modified_base 8: mod_base = OTHER; note = 2'-O-methylguanosine-3'-phosphate
  modified_base 9: mod_base = OTHER; note = 2'-O-methylguanosine-3'-phosphate
  modified_base 10: mod_base = OTHER; note = 2'-O-methylcytidine-3'-phosphate
  modified_base 11: mod_base = OTHER; note = 2'-O-methyluridine-3'-phosphate
  modified_base 12: mod_base = OTHER; note = 2'-O-methylcytidine-3'-phosphate
  modified_base 13: mod_base = OTHER; note = 2'-O-methyluridine-3'-phosphate
  modified_base 14: mod_base = OTHER; note = 2'-deoxy-2'-fluorouridine-3'-phosphate
  modified_base 15: mod_base = OTHER; note = 2'-O-methyluridine-3'-phosphate
  modified_base 16: mod_base = OTHER; note = 2'-deoxy-2'-fluorouridine-3'-phosphate
  modified_base 17: mod_base = OTHER; note = 2'-O-methyluridine-3'-phosphate
  modified_base 18: mod_base = OTHER; note = 2'-O-methyladenosine-3'-phosphate
  modified_base 19: mod_base = OTHER; note = 2'-O-methyladenosine-3'-phosphate
  modified_base 20: mod_base = OTHER; note = 2'-O-methyladenosine-3'-phosphate
  modified_base 21: mod_base = OTHER; note = 2'-O-methyladenosine-3'-phosphorothioate
  modified_base 22: mod_base = OTHER; note = 2'-O-methyladenosine-3'-phosphorothioate
  modified_base 23: mod_base = OTHER; note = 2'-O-methyluridine
tcacataggctctttttaaaaat

SEQ ID NO: 12902 - RNA, 23 nt, synthetic construct
  source 1..23: mol_type = other RNA
  modified_base 1: mod_base = OTHER; note = 2'-O-methyluridine-3'-phosphorothioate 5'-(E)-Vinylphosphonate
  modified_base 2: mod_base = OTHER; note = 2'-deoxy-2'-fluorouridine-3'-phosphorothioate
  modified_base 3: mod_base = OTHER; note = 2'-O-methylcytidine-3'-phosphate
  modified_base 4: mod_base = OTHER; note = 2'-O-methyladenosine-3'-phosphate
  modified_base 5: mod_base = OTHER; note = 2'-O-methylcytidine-3'-phosphate
  modified_base 6: mod_base = OTHER; note = 2'-deoxy-2'-fluoroadenosine-3'-phosphate
  modified_base 7: mod_base = OTHER; note = 2'-O-methyluridine-3'-phosphate
  modified_base 8: mod_base = OTHER; note = 2'-O-methyladenosine-3'-phosphate
  modified_base 9: mod_base = OTHER; note = 2'-O-methylguanosine-3'-phosphate
  modified_base 10: mod_base = OTHER; note = 2'-O-methylguanosine-3'-phosphate
  modified_base 11: mod_base = OTHER; note = 2'-O-methylcytidine-3'-phosphate
  modified_base 12: mod_base = OTHER; note = 2'-O-methyluridine-3'-phosphate
  modified_base 13: mod_base = OTHER; note = 2'-O-methylcytidine-3'-phosphate
  modified_base 14: mod_base = OTHER; note = 2'-deoxy-2'-fluorouridine-3'-phosphate
  modified_base 15: mod_base = OTHER; note = 2'-O-methyluridine-3'-phosphate
  modified_base 16: mod_base = OTHER; note = 2'-deoxy-2'-fluorouridine-3'-phosphate
  modified_base 17: mod_base = OTHER; note = 2'-O-methyluridine-3'-phosphate
  modified_base 18: mod_base = OTHER; note = 2'-O-methyluridine-3'-phosphate
  modified_base 19: mod_base = OTHER; note = 2'-O-methyladenosine-3'-phosphate
  modified_base 20: mod_base = OTHER; note = 2'-O-methyladenosine-3'-phosphate
  modified_base 21: mod_base = OTHER; note = 2'-O-methyladenosine-3'-phosphorothioate
  modified_base 22: mod_base = OTHER; note = 2'-O-methyladenosine-3'-phosphorothioate
  modified_base 23: mod_base = OTHER; note = 2'-O-methyladenosine
ttcacataggctctttttaaaaa

SEQ ID NO: 12903 - RNA, 23 nt, synthetic construct
  source 1..23: mol_type = other RNA
  modified_base 1: mod_base = OTHER; note = 2'-O-methyluridine-3'-phosphorothioate 5'-(E)-Vinylphosphonate
  modified_base 2: mod_base = OTHER; note = 2'-deoxy-2'-fluorouridine-3'-phosphorothioate
  modified_base 3: mod_base = OTHER; note = 2'-O-methyluridine-3'-phosphate
  modified_base 4: mod_base = OTHER; note = 2'-O-methylcytidine-3'-phosphate
  modified_base 5: mod_base = OTHER; note = 2'-O-methyladenosine-3'-phosphate
  modified_base 6: mod_base = OTHER; note = 2'-deoxy-2'-fluorocytidine-3'-phosphate
  modified_base 7: mod_base = OTHER; note = 2'-O-methyladenosine-3'-phosphate
  modified_base 8: mod_base = OTHER; note = 2'-O-methyluridine-3'-phosphate
  modified_base 9: mod_base = OTHER; note = 2'-O-methyladenosine-3'-phosphate
  modified_base 10: mod_base = OTHER; note = 2'-O-methylguanosine-3'-phosphate
  modified_base 11: mod_base = OTHER; note = 2'-O-methylguanosine-3'-phosphate
  modified_base 12: mod_base = OTHER; note = 2'-O-methylcytidine-3'-phosphate
  modified_base 13: mod_base = OTHER; note = 2'-O-methyluridine-3'-phosphate
  modified_base 14: mod_base = OTHER; note = 2'-deoxy-2'-fluorocytidine-3'-phosphate
  modified_base 15: mod_base = OTHER; note = 2'-O-methyluridine-3'-phosphate
  modified_base 16: mod_base = OTHER; note = 2'-deoxy-2'-fluorouridine-3'-phosphate
  modified_base 17: mod_base = OTHER; note = 2'-O-methyluridine-3'-phosphate
  modified_base 18: mod_base = OTHER; note = 2'-O-methyluridine-3'-phosphate
  modified_base 19: mod_base = OTHER; note = 2'-O-methyluridine-3'-phosphate
  modified_base 20: mod_base = OTHER; note = 2'-O-methyladenosine-3'-phosphate
  modified_base 21: mod_base = OTHER; note = 2'-O-methyladenosine-3'-phosphorothioate
  modified_base 22: mod_base = OTHER; note = 2'-O-methyladenosine-3'-phosphorothioate
  modified_base 23: mod_base = OTHER; note = 2'-O-methyladenosine
tttcacataggctctttttaaaa

SEQ ID NO: 12904 - RNA, 23 nt, synthetic construct
  source 1..23: mol_type = other RNA
  modified_base 1: mod_base = OTHER; note = 2'-O-methyluridine-3'-phosphorothioate 5'-(E)-Vinylphosphonate
  modified_base 2: mod_base = OTHER; note = 2'-deoxy-2'-fluorocytidine-3'-phosphorothioate
  modified_base 3: mod_base = OTHER; note = 2'-O-methyluridine-3'-phosphate
  modified_base 4: mod_base = OTHER; note = 2'-O-methyluridine-3'-phosphate
  modified_base 5: mod_base = OTHER; note = 2'-O-methylcytidine-3'-phosphate
  modified_base 6: mod_base = OTHER; note = 2'-deoxy-2'-fluoroadenosine-3'-phosphate
  modified_base 7: mod_base = OTHER; note = 2'-O-methylcytidine-3'-phosphate
  modified_base 8: mod_base = OTHER; note = 2'-O-methyladenosine-3'-phosphate
  modified_base 9: mod_base = OTHER; note = 2'-O-methyluridine-3'-phosphate
  modified_base 10: mod_base = OTHER; note = 2'-O-methyladenosine-3'-phosphate
  modified_base 11: mod_base = OTHER; note = 2'-O-methylguanosine-3'-phosphate
  modified_base 12: mod_base = OTHER; note = 2'-O-methylguanosine-3'-phosphate
  modified_base 13: mod_base = OTHER; note = 2'-O-methylcytidine-3'-phosphate
  modified_base 14: mod_base = OTHER; note = 2'-deoxy-2'-fluorouridine-3'-phosphate
  modified_base 15: mod_base = OTHER; note = 2'-O-methylcytidine-3'-phosphate
  modified_base 16: mod_base = OTHER; note = 2'-deoxy-2'-fluorouridine-3'-phosphate
  modified_base 17: mod_base = OTHER; note = 2'-O-methyluridine-3'-phosphate
  modified_base 18: mod_base = OTHER; note = 2'-O-methyluridine-3'-phosphate
  modified_base 19: mod_base = OTHER; note = 2'-O-methyluridine-3'-phosphate
  modified_base 20: mod_base = OTHER; note = 2'-O-methyluridine-3'-phosphate
  modified_base 21: mod_base = OTHER; note = 2'-O-methyladenosine-3'-phosphorothioate
  modified_base 22: mod_base = OTHER; note = 2'-O-methyladenosine-3'-phosphorothioate
  modified_base 23: mod_base = OTHER; note = 2'-O-methyladenosine
tcttcacataggctctttttaaa

SEQ ID NO: 12905 - RNA, 23 nt, synthetic construct
  source 1..23: mol_type = other RNA
  modified_base 1: mod_base = OTHER; note = 2'-O-methyluridine-3'-phosphorothioate 5'-(E)-Vinylphosphonate
  modified_base 2: mod_base = OTHER; note = 2'-deoxy-2'-fluorocytidine-3'-phosphorothioate
  modified_base 3: mod_base = OTHER; note = 2'-O-methylcytidine-3'-phosphate
  modified_base 4: mod_base = OTHER; note = 2'-O-methyluridine-3'-phosphate
  modified_base 5: mod_base = OTHER; note = 2'-O-methyluridine-3'-phosphate
  modified_base 6: mod_base = OTHER; note = 2'-deoxy-2'-fluorocytidine-3'-phosphate
  modified_base 7: mod_base = OTHER; note = 2'-O-methyladenosine-3'-phosphate
  modified_base 8: mod_base = OTHER; note = 2'-O-methylcytidine-3'-phosphate
  modified_base 9: mod_base = OTHER; note = 2'-O-methyladenosine-3'-phosphate
  modified_base 10: mod_base = OTHER; note = 2'-O-methyluridine-3'-phosphate
  modified_base 11: mod_base = OTHER; note = 2'-O-methyladenosine-3'-phosphate
  modified_base 12: mod_base = OTHER; note = 2'-O-methylguanosine-3'-phosphate
  modified_base 13: mod_base = OTHER; note = 2'-O-methylguanosine-3'-phosphate
  modified_base 14: mod_base = OTHER; note = 2'-deoxy-2'-fluorocytidine-3'-phosphate
  modified_base 15: mod_base = OTHER; note = 2'-O-methyluridine-3'-phosphate
  modified_base 16: mod_base = OTHER; note = 2'-deoxy-2'-fluorocytidine-3'-phosphate
  modified_base 17: mod_base = OTHER; note = 2'-O-methyluridine-3'-phosphate
  modified_base 18: mod_base = OTHER; note = 2'-O-methyluridine-3'-phosphate
  modified_base 19: mod_base = OTHER; note = 2'-O-methyluridine-3'-phosphate
  modified_base 20: mod_base = OTHER; note = 2'-O-methyluridine-3'-phosphate
  modified_base 21: mod_base = OTHER; note = 2'-O-methyluridine-3'-phosphorothioate
  modified_base 22: mod_base = OTHER; note = 2'-O-methyladenosine-3'-phosphorothioate
  modified_base 23: mod_base = OTHER; note = 2'-O-methyladenosine
tccttcacataggctctttttaa

SEQ ID NO: 12906 - RNA, 23 nt, synthetic construct
  source 1..23: mol_type = other RNA
  modified_base 1: mod_base = OTHER; note = 2'-O-methyluridine-3'-phosphorothioate 5'-(E)-Vinylphosphonate
  modified_base 2: mod_base = OTHER; note = 2'-deoxy-2'-fluoroadenosine-3'-phosphorothioate
  modified_base 3: mod_base = OTHER; note = 2'-O-methylcytidine-3'-phosphate
  modified_base 4: mod_base = OTHER; note = 2'-O-methyladenosine-3'-phosphate
  modified_base 5: mod_base = OTHER; note = 2'-O-methyladenosine-3'-phosphate
  modified_base 6: mod_base = OTHER; note = 2'-deoxy-2'-fluoroguanosine-3'-phosphate
  modified_base 7: mod_base = OTHER; note = 2'-O-methyladenosine-3'-phosphate
  modified_base 8: mod_base = OTHER; note = 2'-O-methyladenosine-3'-phosphate
  modified_base 9: mod_base = OTHER; note = 2'-O-methylcytidine-3'-phosphate
  modified_base 10: mod_base = OTHER; note = 2'-O-methyladenosine-3'-phosphate
  modified_base 11: mod_base = OTHER; note = 2'-O-methyladenosine-3'-phosphate
  modified_base 12: mod_base = OTHER; note = 2'-O-methylguanosine-3'-phosphate
  modified_base 13: mod_base = OTHER; note = 2'-O-methylcytidine-3'-phosphate
  modified_base 14: mod_base = OTHER; note = 2'-deoxy-2'-fluoroadenosine-3'-phosphate
  modified_base 15: mod_base = OTHER; note = 2'-O-methyladenosine-3'-phosphate
  modified_base 16: mod_base = OTHER; note = 2'-deoxy-2'-fluoroguanosine-3'-phosphate
  modified_base 17: mod_base = OTHER; note = 2'-O-methyladenosine-3'-phosphate
  modified_base 18: mod_base = OTHER; note = 2'-O-methyluridine-3'-phosphate
  modified_base 19: mod_base = OTHER; note = 2'-O-methyluridine-3'-phosphate
  modified_base 20: mod_base = OTHER; note = 2'-O-methyladenosine-3'-phosphate
  modified_base 21: mod_base = OTHER; note = 2'-O-methylcytidine-3'-phosphorothioate
  modified_base 22: mod_base = OTHER; note = 2'-O-methylcytidine-3'-phosphorothioate
  modified_base 23: mod_base = OTHER; note = 2'-O-methylcytidine
tacaagaacaagcaagattaccc

SEQ ID NO: 12907 - RNA, 23 nt, synthetic construct
  source 1..23: mol_type = other RNA
  modified_base 1: mod_base = OTHER; note = 2'-O-methyluridine-3'-phosphorothioate 5'-(E)-Vinylphosphonate
  modified_base 2: mod_base = OTHER; note = 2'-deoxy-2'-fluoroadenosine-3'-phosphorothioate
  modified_base 3: mod_base = OTHER; note = 2'-O-methyladenosine-3'-phosphate
  modified_base 4: mod_base = OTHER; note = 2'-O-methylcytidine-3'-phosphate
  modified_base 5: mod_base = OTHER; note = 2'-O-methyladenosine-3'-phosphate
  modified_base 6: mod_base = OTHER; note = 2'-deoxy-2'-fluoroadenosine-3'-phosphate
  modified_base 7: mod_base = OTHER; note = 2'-O-methylguanosine-3'-phosphate
  modified_base 8: mod_base = OTHER; note = 2'-O-methyladenosine-3'-phosphate
  modified_base 9: mod_base = OTHER; note = 2'-O-methyladenosine-3'-phosphate
  modified_base 10: mod_base = OTHER; note = 2'-O-methylcytidine-3'-phosphate
  modified_base 11: mod_base = OTHER; note = 2'-O-methyladenosine-3'-phosphate
  modified_base 12: mod_base = OTHER; note = 2'-O-methyladenosine-3'-phosphate
  modified_base 13: mod_base = OTHER; note = 2'-O-methylguanosine-3'-phosphate
  modified_base 14: mod_base = OTHER; note = 2'-deoxy-2'-fluorocytidine-3'-phosphate
  modified_base 15: mod_base = OTHER; note = 2'-O-methyladenosine-3'-phosphate
  modified_base 16: mod_base = OTHER; note = 2'-deoxy-2'-fluoroadenosine-3'-phosphate
  modified_base 17: mod_base = OTHER; note = 2'-O-methylguanosine-3'-phosphate
  modified_base 18: mod_base = OTHER; note = 2'-O-methyladenosine-3'-phosphate
  modified_base 19: mod_base = OTHER; note = 2'-O-methyluridine-3'-phosphate
  modified_base 20: mod_base = OTHER; note = 2'-O-methyluridine-3'-phosphate
  modified_base 21: mod_base = OTHER; note = 2'-O-methyladenosine-3'-phosphorothioate
  modified_base 22: mod_base = OTHER; note = 2'-O-methylcytidine-3'-phosphorothioate
  modified_base 23: mod_base = OTHER; note = 2'-O-methylcytidine
taacaagaacaagcaagattacc

SEQ ID NO: 12908 - RNA, 23 nt, synthetic construct
  source 1..23: mol_type = other RNA
  modified_base 1: mod_base = OTHER; note = 2'-O-methyluridine-3'-phosphorothioate 5'-(E)-Vinylphosphonate
  modified_base 2: mod_base = OTHER; note = 2'-deoxy-2'-fluorouridine-3'-phosphorothioate
  modified_base 3: mod_base = OTHER; note = 2'-O-methyladenosine-3'-phosphate
  modified_base 4: mod_base = OTHER; note = 2'-O-methyladenosine-3'-phosphate
  modified_base 5: mod_base = OTHER; note = 2'-O-methylcytidine-3'-phosphate
  modified_base 6: mod_base = OTHER; note = 2'-deoxy-2'-fluoroadenosine-3'-phosphate
  modified_base 7: mod_base = OTHER; note = 2'-O-methyladenosine-3'-phosphate
  modified_base 8: mod_base = OTHER; note = 2'-O-methylguanosine-3'-phosphate
  modified_base 9: mod_base = OTHER; note = 2'-O-methyladenosine-3'-phosphate
  modified_base 10: mod_base = OTHER; note = 2'-O-methyladenosine-3'-phosphate
  modified_base 11: mod_base = OTHER; note = 2'-O-methylcytidine-3'-phosphate
  modified_base 12: mod_base = OTHER; note = 2'-O-methyladenosine-3'-phosphate
  modified_base 13: mod_base = OTHER; note = 2'-O-methyladenosine-3'-phosphate
  modified_base 14: mod_base = OTHER; note = 2'-deoxy-2'-fluoroguanosine-3'-phosphate
  modified_base 15: mod_base = OTHER; note = 2'-O-methylcytidine-3'-phosphate
  modified_base 16: mod_base = OTHER; note = 2'-deoxy-2'-fluoroadenosine-3'-phosphate
  modified_base 17: mod_base = OTHER; note = 2'-O-methyladenosine-3'-phosphate
  modified_base 18: mod_base = OTHER; note = 2'-O-methylguanosine-3'-phosphate
  modified_base 19: mod_base = OTHER; note = 2'-O-methyladenosine-3'-phosphate
  modified_base 20: mod_base = OTHER; note = 2'-O-methyluridine-3'-phosphate
  modified_base 21: mod_base = OTHER; note = 2'-O-methyluridine-3'-phosphorothioate
  modified_base 22: mod_base = OTHER; note = 2'-O-methyladenosine-3'-phosphorothioate
  modified_base 23: mod_base = OTHER; note = 2'-O-methylcytidine
ttaacaagaacaagcaagattac

SEQ ID NO: 12909 - RNA, 23 nt, synthetic construct
  source 1..23: mol_type = other RNA
  modified_base 1: mod_base = OTHER; note = 2'-O-methyluridine-3'-phosphorothioate 5'-(E)-Vinylphosphonate
  modified_base 2: mod_base = OTHER; note = 2'-deoxy-2'-fluoroguanosine-3'-phosphorothioate
  modified_base 3: mod_base = OTHER; note = 2'-O-methyluridine-3'-phosphate
  modified_base 4: mod_base = OTHER; note = 2'-O-methyladenosine-3'-phosphate
  modified_base 5: mod_base = OTHER; note = 2'-O-methyladenosine-3'-phosphate
  modified_base 6: mod_base = OTHER; note = 2'-deoxy-2'-fluorocytidine-3'-phosphate
  modified_base 7: mod_base = OTHER; note = 2'-O-methyladenosine-3'-phosphate
  modified_base 8: mod_base = OTHER; note = 2'-O-methyladenosine-3'-phosphate
  modified_base 9: mod_base = OTHER; note = 2'-O-methylguanosine-3'-phosphate
  modified_base 10: mod_base = OTHER; note = 2'-O-methyladenosine-3'-phosphate
  modified_base 11: mod_base = OTHER; note = 2'-O-methyladenosine-3'-phosphate
  modified_base 12: mod_base = OTHER; note = 2'-O-methylcytidine-3'-phosphate
  modified_base 13: mod_base = OTHER; note = 2'-O-methyladenosine-3'-phosphate
  modified_base 14: mod_base = OTHER; note = 2'-deoxy-2'-fluoroadenosine-3'-phosphate
  modified_base 15: mod_base = OTHER; note = 2'-O-methylguanosine-3'-phosphate
  modified_base 16: mod_base = OTHER; note = 2'-deoxy-2'-fluorocytidine-3'-phosphate
  modified_base 17: mod_base = OTHER; note = 2'-O-methyladenosine-3'-phosphate
  modified_base 18: mod_base = OTHER; note = 2'-O-methyladenosine-3'-phosphate
  modified_base 19: mod_base = OTHER; note = 2'-O-methylguanosine-3'-phosphate
  modified_base 20: mod_base = OTHER; note = 2'-O-methyladenosine-3'-phosphate
  modified_base 21: mod_base = OTHER; note = 2'-O-methyluridine-3'-phosphorothioate
  modified_base 22: mod_base = OTHER; note = 2'-O-methyluridine-3'-phosphorothioate
  modified_base 23: mod_base = OTHER; note = 2'-O-methyladenosine
tgtaacaagaacaagcaagatta

SEQ ID NO: 12910 - RNA, 23 nt, synthetic construct
  source 1..23: mol_type = other RNA
  modified_base 1: mod_base = OTHER; note = 2'-O-methyluridine-3'-phosphorothioate 5'-(E)-Vinylphosphonate
  modified_base 2: mod_base = OTHER; note = 2'-deoxy-2'-fluoroadenosine-3'-phosphorothioate
  modified_base 3: mod_base = OTHER; note = 2'-O-methylguanosine-3'-phosphate
  modified_base 4: mod_base = OTHER; note = 2'-O-methyluridine-3'-phosphate
  modified_base 5: mod_base = OTHER; note = 2'-O-methyladenosine-3'-phosphate
  modified_base 6: mod_base = OTHER; note = 2'-deoxy-2'-fluoroadenosine-3'-phosphate
  modified_base 7: mod_base = OTHER; note = 2'-O-methylcytidine-3'-phosphate
  modified_base 8: mod_base = OTHER; note = 2'-O-methyladenosine-3'-phosphate
  modified_base 9: mod_base = OTHER; note = 2'-O-methyladenosine-3'-phosphate
  modified_base 10: mod_base = OTHER; note = 2'-O-methylguanosine-3'-phosphate
  modified_base 11: mod_base = OTHER; note = 2'-O-methyladenosine-3'-phosphate
  modified_base 12: mod_base = OTHER; note = 2'-O-methyladenosine-3'-phosphate
  modified_base 13: mod_base = OTHER; note = 2'-O-methylcytidine-3'-phosphate
  modified_base 14: mod_base = OTHER; note = 2'-deoxy-2'-fluoroadenosine-3'-phosphate
  modified_base 15: mod_base = OTHER; note = 2'-O-methyladenosine-3'-phosphate
  modified_base 16: mod_base = OTHER; note = 2'-deoxy-2'-fluoroguanosine-3'-phosphate
  modified_base 17: mod_base = OTHER; note = 2'-O-methylcytidine-3'-phosphate
  modified_base 18: mod_base = OTHER; note = 2'-O-methyladenosine-3'-phosphate
  modified_base 19: mod_base = OTHER; note = 2'-O-methyladenosine-3'-phosphate
  modified_base 20: mod_base = OTHER; note = 2'-O-methylguanosine-3'-phosphate
  modified_base 21: mod_base = OTHER; note = 2'-O-methyladenosine-3'-phosphorothioate
  modified_base 22: mod_base = OTHER; note = 2'-O-methyluridine-3'-phosphorothioate
  modified_base 23: mod_base = OTHER; note = 2'-O-methyluridine
tagtaacaagaacaagcaagatt

SEQ ID NO: 12911 - RNA, 23 nt, synthetic construct
  source 1..23: mol_type = other RNA
  modified_base 1: mod_base = OTHER; note = 2'-O-methyluridine-3'-phosphorothioate 5'-(E)-Vinylphosphonate
  modified_base 2: mod_base = OTHER; note = 2'-deoxy-2'-fluorouridine-3'-phosphorothioate
  modified_base 3: mod_base = OTHER; note = 2'-O-methyladenosine-3'-phosphate
  modified_base 4: mod_base = OTHER; note = 2'-O-methylguanosine-3'-phosphate
  modified_base 5: mod_base = OTHER; note = 2'-O-methyluridine-3'-phosphate
  modified_base 6: mod_base = OTHER; note = 2'-deoxy-2'-fluoroadenosine-3'-phosphate
  modified_base 7: mod_base = OTHER; note = 2'-O-methyladenosine-3'-phosphate
  modified_base 8: mod_base = OTHER; note = 2'-O-methylcytidine-3'-phosphate
  modified_base 9: mod_base = OTHER; note = 2'-O-methyladenosine-3'-phosphate
  modified_base 10: mod_base = OTHER; note = 2'-O-methyladenosine-3'-phosphate
  modified_base 11: mod_base = OTHER; note = 2'-O-methylguanosine-3'-phosphate
  modified_base 12: mod_base = OTHER; note = 2'-O-methyladenosine-3'-phosphate
  modified_base 13: mod_base = OTHER; note = 2'-O-methyladenosine-3'-phosphate
  modified_base 14: mod_base = OTHER; note = 2'-deoxy-2'-fluorocytidine-3'-phosphate
  modified_base 15: mod_base = OTHER; note = 2'-O-methyladenosine-3'-phosphate
  modified_base 16: mod_base = OTHER; note = 2'-deoxy-2'-fluoroadenosine-3'-phosphate
  modified_base 17: mod_base = OTHER; note = 2'-O-methylguanosine-3'-phosphate
  modified_base 18: mod_base = OTHER; note = 2'-O-methylcytidine-3'-phosphate
  modified_base 19: mod_base = OTHER; note = 2'-O-methyladenosine-3'-phosphate
  modified_base 20: mod_base = OTHER; note = 2'-O-methyladenosine-3'-phosphate
  modified_base 21: mod_base = OTHER; note = 2'-O-methylguanosine-3'-phosphorothioate
  modified_base 22: mod_base = OTHER; note = 2'-O-methyladenosine-3'-phosphorothioate
  modified_base 23: mod_base = OTHER; note = 2'-O-methyluridine
ttagtaacaagaacaagcaagat

SEQ ID NO: 12912 - RNA, 23 nt, synthetic construct
  source 1..23: mol_type = other RNA
  modified_base 1: mod_base = OTHER; note = 2'-O-methyluridine-3'-phosphorothioate 5'-(E)-Vinylphosphonate
  modified_base 2: mod_base = OTHER; note = 2'-deoxy-2'-fluorouridine-3'-phosphorothioate
  modified_base 3: mod_base = OTHER; note = 2'-O-methyluridine-3'-phosphate
  modified_base 4: mod_base = OTHER; note = 2'-O-methyladenosine-3'-phosphate
  modified_base 5: mod_base = OTHER; note = 2'-O-methylguanosine-3'-phosphate
  modified_base 6: mod_base = OTHER; note = 2'-deoxy-2'-fluorouridine-3'-phosphate
  modified_base 7: mod_base = OTHER; note = 2'-O-methyladenosine-3'-phosphate
  modified_base 8: mod_base = OTHER; note = 2'-O-methyladenosine-3'-phosphate
  modified_base 9: mod_base = OTHER; note = 2'-O-methylcytidine-3'-phosphate
  modified_base 10: mod_base = OTHER; note = 2'-O-methyladenosine-3'-phosphate
  modified_base 11: mod_base = OTHER; note = 2'-O-methyladenosine-3'-phosphate
  modified_base 12: mod_base = OTHER; note = 2'-O-methylguanosine-3'-phosphate
  modified_base 13: mod_base = OTHER; note = 2'-O-methyladenosine-3'-phosphate
  modified_base 14: mod_base = OTHER; note = 2'-deoxy-2'-fluoroadenosine-3'-phosphate
  modified_base 15: mod_base = OTHER; note = 2'-O-methylcytidine-3'-phosphate
  modified_base 16: mod_base = OTHER; note = 2'-deoxy-2'-fluoroadenosine-3'-phosphate
  modified_base 17: mod_base = OTHER; note = 2'-O-methyladenosine-3'-phosphate
  modified_base 18: mod_base = OTHER; note = 2'-O-methylguanosine-3'-phosphate
  modified_base 19: mod_base = OTHER; note = 2'-O-methylcytidine-3'-phosphate
  modified_base 20: mod_base = OTHER; note = 2'-O-methyladenosine-3'-phosphate
  modified_base 21: mod_base = OTHER; note = 2'-O-methyladenosine-3'-phosphorothioate
  modified_base 22: mod_base = OTHER; note = 2'-O-methylguanosine-3'-phosphorothioate
  modified_base 23: mod_base = OTHER; note = 2'-O-methyladenosine
tttagtaacaagaacaagcaaga

SEQ ID NO: 12913 - RNA, 23 nt, synthetic construct
  source 1..23: mol_type = other RNA
  modified_base 1: mod_base = OTHER; note = 2'-O-methyluridine-3'-phosphorothioate 5'-(E)-Vinylphosphonate
  modified_base 2: mod_base = OTHER; note = 2'-deoxy-2'-fluoroadenosine-3'-phosphorothioate
  modified_base 3: mod_base = OTHER; note = 2'-O-methyluridine-3'-phosphate
  modified_base 4: mod_base = OTHER; note = 2'-O-methyluridine-3'-phosphate
  modified_base 5: mod_base = OTHER; note = 2'-O-methyladenosine-3'-phosphate
  modified_base 6: mod_base = OTHER; note = 2'-deoxy-2'-fluoroguanosine-3'-phosphate
  modified_base 7: mod_base = OTHER; note = 2'-O-methyluridine-3'-phosphate
  modified_base 8: mod_base = OTHER; note = 2'-O-methyladenosine-3'-phosphate
  modified_base 9: mod_base = OTHER; note = 2'-O-methyladenosine-3'-phosphate
  modified_base 10: mod_base = OTHER; note = 2'-O-methylcytidine-3'-phosphate
  modified_base 11: mod_base = OTHER; note = 2'-O-methyladenosine-3'-phosphate
  modified_base 12: mod_base = OTHER; note = 2'-O-methyladenosine-3'-phosphate
  modified_base 13: mod_base = OTHER; note = 2'-O-methylguanosine-3'-phosphate
  modified_base 14: mod_base = OTHER; note = 2'-deoxy-2'-fluoroadenosine-3'-phosphate
  modified_base 15: mod_base = OTHER; note = 2'-O-methyladenosine-3'-phosphate
  modified_base 16: mod_base = OTHER; note = 2'-deoxy-2'-fluorocytidine-3'-phosphate
  modified_base 17: mod_base = OTHER; note = 2'-O-methyladenosine-3'-phosphate
  modified_base 18: mod_base = OTHER; note = 2'-O-methyladenosine-3'-phosphate
  modified_base 19: mod_base = OTHER; note = 2'-O-methylguanosine-3'-phosphate
  modified_base 20: mod_base = OTHER; note = 2'-O-methylcytidine-3'-phosphate
  modified_base 21: mod_base = OTHER; note = 2'-O-methyladenosine-3'-phosphorothioate
  modified_base 22: mod_base = OTHER; note = 2'-O-methyladenosine-3'-phosphorothioate
  modified_base 23: mod_base = OTHER; note = 2'-O-methylguanosine
tattagtaacaagaacaagcaag

SEQ ID NO: 12914 - RNA, 23 nt, synthetic construct
  source 1..23: mol_type = other RNA
  modified_base 1: mod_base = OTHER; note = 2'-O-methyluridine-3'-phosphorothioate 5'-(E)-Vinylphosphonate
  modified_base 2: mod_base = OTHER; note = 2'-deoxy-2'-fluoroadenosine-3'-phosphorothioate
  modified_base 3: mod_base = OTHER; note = 2'-O-methyladenosine-3'-phosphate
  modified_base 4: mod_base = OTHER; note = 2'-O-methyluridine-3'-phosphate
  modified_base 5: mod_base = OTHER; note = 2'-O-methyluridine-3'-phosphate
  modified_base 6: mod_base = OTHER; note = 2'-deoxy-2'-fluoroadenosine-3'-phosphate
  modified_base 7: mod_base = OTHER; note = 2'-O-methylguanosine-3'-phosphate
  modified_base 8: mod_base = OTHER; note = 2'-O-methyluridine-3'-phosphate
  modified_base 9: mod_base = OTHER; note = 2'-O-methyladenosine-3'-phosphate
  modified_base 10: mod_base = OTHER; note = 2'-O-methyladenosine-3'-phosphate
  modified_base 11: mod_base = OTHER; note = 2'-O-methylcytidine-3'-phosphate
  modified_base 12: mod_base = OTHER; note = 2'-O-methyladenosine-3'-phosphate
  modified_base 13: mod_base = OTHER; note = 2'-O-methyladenosine-3'-phosphate
  modified_base 14: mod_base = OTHER; note = 2'-deoxy-2'-fluoroguanosine-3'-phosphate
  modified_base 15: mod_base = OTHER; note = 2'-O-methyladenosine-3'-phosphate
  modified_base 16: mod_base = OTHER; note = 2'-deoxy-2'-fluoroadenosine-3'-phosphate
  modified_base 17: mod_base = OTHER; note = 2'-O-methylcytidine-3'-phosphate
  modified_base 18: mod_base = OTHER; note = 2'-O-methyladenosine-3'-phosphate
  modified_base 19: mod_base = OTHER; note = 2'-O-methyladenosine-3'-phosphate
  modified_base 20: mod_base = OTHER; note = 2'-O-methylguanosine-3'-phosphate
  modified_base 21: mod_base = OTHER; note = 2'-O-methylcytidine-3'-phosphorothioate
  modified_base 22: mod_base = OTHER; note = 2'-O-methyladenosine-3'-phosphorothioate
  modified_base 23: mod_base = OTHER; note = 2'-O-methyladenosine
taattagtaacaagaacaagcaa

SEQ ID NO: 12915 - RNA, 23 nt, synthetic construct
  source 1..23: mol_type = other RNA
  modified_base 1: mod_base = OTHER; note = 2'-O-methyluridine-3'-phosphorothioate 5'-(E)-Vinylphosphonate
  modified_base 2: mod_base = OTHER; note = 2'-deoxy-2'-fluoroadenosine-3'-phosphorothioate
  modified_base 3: mod_base = OTHER; note = 2'-O-methyladenosine-3'-phosphate
  modified_base 4: mod_base = OTHER; note = 2'-O-methyladenosine-3'-phosphate
  modified_base 5: mod_base = OTHER; note = 2'-O-methyluridine-3'-phosphate
  modified_base 6: mod_base = OTHER; note = 2'-deoxy-2'-fluorouridine-3'-phosphate
  modified_base 7: mod_base = OTHER; note = 2'-O-methyladenosine-3'-phosphate
  modified_base 8: mod_base = OTHER; note = 2'-O-methylguanosine-3'-phosphate
  modified_base 9: mod_base = OTHER; note = 2'-O-methyluridine-3'-phosphate
  modified_base 10: mod_base = OTHER; note = 2'-O-methyladenosine-3'-phosphate
  modified_base 11: mod_base = OTHER; note = 2'-O-methyladenosine-3'-phosphate
  modified_base 12: mod_base = OTHER; note = 2'-O-methylcytidine-3'-phosphate
  modified_base 13: mod_base = OTHER; note = 2'-O-methyladenosine-3'-phosphate
  modified_base 14: mod_base = OTHER; note = 2'-deoxy-2'-fluoroadenosine-3'-phosphate
  modified_base 15: mod_base = OTHER; note = 2'-O-methylguanosine-3'-phosphate
  modified_base 16: mod_base = OTHER; note = 2'-deoxy-2'-fluoroadenosine-3'-phosphate
  modified_base 17: mod_base = OTHER; note = 2'-O-methyladenosine-3'-phosphate
  modified_base 18: mod_base = OTHER; note = 2'-O-methylcytidine-3'-phosphate
  modified_base 19: mod_base = OTHER; note = 2'-O-methyladenosine-3'-phosphate
  modified_base 20: mod_base = OTHER; note = 2'-O-methyladenosine-3'-phosphate
  modified_base 21: mod_base = OTHER; note = 2'-O-methylguanosine-3'-phosphorothioate
  modified_base 22: mod_base = OTHER; note = 2'-O-methylcytidine-3'-phosphorothioate
  modified_base 23: mod_base = OTHER; note = 2'-O-methyladenosine
taaattagtaacaagaacaagca

SEQ ID NO: 12916 - RNA, 23 nt, synthetic construct
  source 1..23: mol_type = other RNA
  modified_base 1: mod_base = OTHER; note = 2'-O-methyluridine-3'-phosphorothioate 5'-(E)-Vinylphosphonate
  modified_base 2: mod_base = OTHER; note = 2'-deoxy-2'-fluoroguanosine-3'-phosphorothioate
  modified_base 3: mod_base = OTHER; note = 2'-O-methyladenosine-3'-phosphate
  modified_base 4: mod_base = OTHER; note = 2'-O-methyladenosine-3'-phosphate
  modified_base 5: mod_base = OTHER; note = 2'-O-methyladenosine-3'-phosphate
  modified_base 6: mod_base = OTHER; note = 2'-deoxy-2'-fluorouridine-3'-phosphate
  modified_base 7: mod_base = OTHER; note = 2'-O-methyluridine-3'-phosphate
  modified_base 8: mod_base = OTHER; note = 2'-O-methyladenosine-3'-phosphate
  modified_base 9: mod_base = OTHER; note = 2'-O-methylguanosine-3'-phosphate
  modified_base 10: mod_base = OTHER; note = 2'-O-methyluridine-3'-phosphate
  modified_base 11: mod_base = OTHER; note = 2'-O-methyladenosine-3'-phosphate
  modified_base 12: mod_base = OTHER; note = 2'-O-methyladenosine-3'-phosphate
  modified_base 13: mod_base = OTHER; note = 2'-O-methylcytidine-3'-phosphate
  modified_base 14: mod_base = OTHER; note = 2'-deoxy-2'-fluoroadenosine-3'-phosphate
  modified_base 15: mod_base = OTHER; note = 2'-O-methyladenosine-3'-phosphate
  modified_base 16: mod_base = OTHER; note = 2'-deoxy-2'-fluoroguanosine-3'-phosphate
  modified_base 17: mod_base = OTHER; note = 2'-O-methyladenosine-3'-phosphate
  modified_base 18: mod_base = OTHER; note = 2'-O-methyladenosine-3'-phosphate
  modified_base 19: mod_base = OTHER; note = 2'-O-methylcytidine-3'-phosphate
  modified_base 20: mod_base = OTHER; note = 2'-O-methyladenosine-3'-phosphate
  modified_base 21: mod_base = OTHER; note = 2'-O-methyladenosine-3'-phosphorothioate
  modified_base 22: mod_base = OTHER; note = 2'-O-methylguanosine-3'-phosphorothioate
  modified_base 23: mod_base = OTHER; note = 2'-O-methylcytidine
tgaaattagtaacaagaacaagc

SEQ ID NO: 12917 - RNA, 23 nt, synthetic construct
  source 1..23: mol_type = other RNA
  modified_base 1: mod_base = OTHER; note = 2'-O-methyluridine-3'-phosphorothioate 5'-(E)-Vinylphosphonate
  modified_base 2: mod_base = OTHER; note = 2'-deoxy-2'-fluorouridine-3'-phosphorothioate
  modified_base 3: mod_base = OTHER; note = 2'-O-methyluridine-3'-phosphate
  modified_base 4: mod_base = OTHER; note = 2'-O-methylcytidine-3'-phosphate
  modified_base 5: mod_base = OTHER; note = 2'-O-methylguanosine-3'-phosphate
  modified_base 6: mod_base = OTHER; note = 2'-deoxy-2'-fluorouridine-3'-phosphate
  modified_base 7: mod_base = OTHER; note = 2'-O-methyluridine-3'-phosphate
  modified_base 8: mod_base = OTHER; note = 2'-O-methylcytidine-3'-phosphate
  modified_base 9: mod_base = OTHER; note = 2'-O-methyluridine-3'-phosphate
  modified_base 10: mod_base = OTHER; note = 2'-O-methyluridine-3'-phosphate
  modified_base 11: mod_base = OTHER; note = 2'-O-methyladenosine-3'-phosphate
  modified_base 12: mod_base = OTHER; note = 2'-O-methyluridine-3'-phosphate
  modified_base 13: mod_base = OTHER; note = 2'-O-methyladenosine-3'-phosphate
  modified_base 14: mod_base = OTHER; note = 2'-deoxy-2'-fluorouridine-3'-phosphate
  modified_base 15: mod_base = OTHER; note = 2'-O-methyladenosine-3'-phosphate
  modified_base 16: mod_base = OTHER; note = 2'-deoxy-2'-fluorouridine-3'-phosphate
  modified_base 17: mod_base = OTHER; note = 2'-O-methylguanosine-3'-phosphate
  modified_base 18: mod_base = OTHER; note = 2'-O-methylcytidine-3'-phosphate
  modified_base 19: mod_base = OTHER; note = 2'-O-methyladenosine-3'-phosphate
  modified_base 20: mod_base = OTHER; note = 2'-O-methylguanosine-3'-phosphate
  modified_base 21: mod_base = OTHER; note = 2'-O-methyladenosine-3'-phosphorothioate
  modified_base 22: mod_base = OTHER; note = 2'-O-methyladenosine-3'-phosphorothioate
  modified_base 23: mod_base = OTHER; note = 2'-O-methyladenosine
tttcgttcttatatatgcagaaa

SEQ ID NO: 12918 - RNA, 23 nt, synthetic construct
  source 1..23: mol_type = other RNA
  modified_base 1: mod_base = OTHER; note = 2'-O-methyluridine-3'-phosphorothioate 5'-(E)-Vinylphosphonate
  modified_base 2: mod_base = OTHER; note = 2'-deoxy-2'-fluoroadenosine-3'-phosphorothioate
  modified_base 3: mod_base = OTHER; note = 2'-O-methyladenosine-3'-phosphate
  modified_base 4: mod_base = OTHER; note = 2'-O-methyladenosine-3'-phosphate
  modified_base 5: mod_base = OTHER; note = 2'-O-methyladenosine-3'-phosphate
  modified_base 6: mod_base = OTHER; note = 2'-deoxy-2'-fluorocytidine-3'-phosphate
  modified_base 7: mod_base = OTHER; note = 2'-O-methyladenosine-3'-phosphate
  modified_base 8: mod_base = OTHER; note = 2'-O-methylguanosine-3'-phosphate
  modified_base 9: mod_base = OTHER; note = 2'-O-methylguanosine-3'-phosphate
  modified_base 10: mod_base = OTHER; note = 2'-O-methyladenosine-3'-phosphate
  modified_base 11: mod_base = OTHER; note = 2'-O-methyladenosine-3'-phosphate
  modified_base 12: mod_base = OTHER; note = 2'-O-methyladenosine-3'-phosphate
  modified_base 13: mod_base = OTHER; note = 2'-O-methyluridine-3'-phosphate
  modified_base 14: mod_base = OTHER; note = 2'-deoxy-2'-fluoroadenosine-3'-phosphate
  modified_base 15: mod_base = OTHER; note = 2'-O-methyluridine-3'-phosphate
  modified_base 16: mod_base = OTHER; note = 2'-deoxy-2'-fluorocytidine-3'-phosphate
  modified_base 17: mod_base = OTHER; note = 2'-O-methyladenosine-3'-phosphate
  modified_base 18: mod_base = OTHER; note = 2'-O-methyluridine-3'-phosphate
  modified_base 19: mod_base = OTHER; note = 2'-O-methyluridine-3'-phosphate
  modified_base 20: mod_base = OTHER; note = 2'-O-methylcytidine-3'-phosphate
  modified_base 21: mod_base = OTHER; note = 2'-O-methyluridine-3'-phosphorothioate
  modified_base 22: mod_base = OTHER; note = 2'-O-methyluridine-3'-phosphorothioate
  modified_base 23: mod_base = OTHER; note = 2'-O-methylguanosine
taaaacaggaaatatcattcttg

SEQ ID NO: 12919 - RNA, 23 nt, synthetic construct
  source 1..23: mol_type = other RNA
  modified_base 1: mod_base = OTHER; note = 2'-O-methyluridine-3'-phosphorothioate 5'-(E)-Vinylphosphonate
  modified_base 2: mod_base = OTHER; note = 2'-deoxy-2'-fluorouridine-3'-phosphorothioate
  modified_base 3: mod_base = OTHER; note = 2'-O-methyluridine-3'-phosphate
  modified_base 4: mod_base = OTHER; note = 2'-O-methyluridine-3'-phosphate
  modified_base 5: mod_base = OTHER; note = 2'-O-methyladenosine-3'-phosphate
  modified_base 6: mod_base = OTHER; note = 2'-deoxy-2'-fluorouridine-3'-phosphate
  modified_base 7: mod_base = OTHER; note = 2'-O-methyluridine-3'-phosphate
  modified_base 8: mod_base = OTHER; note = 2'-O-methyluridine-3'-phosphate
  modified_base 9: mod_base = OTHER; note = 2'-O-methylguanosine-3'-phosphate
  modified_base 10: mod_base = OTHER; note = 2'-O-methyladenosine-3'-phosphate
  modified_base 11: mod_base = OTHER; note = 2'-O-methylguanosine-3'-phosphate
  modified_base 12: mod_base = OTHER; note = 2'-O-methylguanosine-3'-phosphate
  modified_base 13: mod_base = OTHER; note = 2'-O-methylcytidine-3'-phosphate
  modified_base 14: mod_base = OTHER; note = 2'-deoxy-2'-fluoroadenosine-3'-phosphate
  modified_base 15: mod_base = OTHER; note = 2'-O-methylcytidine-3'-phosphate
  modified_base 16: mod_base = OTHER; note = 2'-deoxy-2'-fluoroguanosine-3'-phosphate
  modified_base 17: mod_base = OTHER; note = 2'-O-methyluridine-3'-phosphate
  modified_base 18: mod_base = OTHER; note = 2'-O-methyladenosine-3'-phosphate
  modified_base 19: mod_base = OTHER; note = 2'-O-methylcytidine-3'-phosphate
  modified_base 20: mod_base = OTHER; note = 2'-O-methyladenosine-3'-phosphate
  modified_base 21: mod_base = OTHER; note = 2'-O-methyladenosine-3'-phosphorothioate
  modified_base 22: mod_base = OTHER; note = 2'-O-methylcytidine-3'-phosphorothioate
  modified_base 23: mod_base = OTHER; note = 2'-O-methylcytidine
ttttatttgaggcacgtacaacc

SEQ ID NO: 12920 - RNA, 23 nt, synthetic construct
  source 1..23: mol_type = other RNA
  modified_base 1: mod_base = OTHER; note = 2'-O-methyluridine-3'-phosphorothioate 5'-(E)-Vinylphosphonate
  modified_base 2: mod_base = OTHER; note = 2'-deoxy-2'-fluoroadenosine-3'-phosphorothioate
  modified_base 3: mod_base = OTHER; note = 2'-O-methyluridine-3'-phosphate
  modified_base 4: mod_base = OTHER; note = 2'-O-methyluridine-3'-phosphate
  modified_base 5: mod_base = OTHER; note = 2'-O-methylcytidine-3'-phosphate
  modified_base 6: mod_base = OTHER; note = 2'-deoxy-2'-fluorouridine-3'-phosphate
  modified_base 7: mod_base = OTHER; note = 2'-O-methyluridine-3'-phosphate
  modified_base 8: mod_base = OTHER; note = 2'-O-methylguanosine-3'-phosphate
  modified_base 9: mod_base = OTHER; note = 2'-O-methyluridine-3'-phosphate
  modified_base 10: mod_base = OTHER; note = 2'-O-methyluridine-3'-phosphate
  modified_base 11: mod_base = OTHER; note = 2'-O-methyluridine-3'-phosphate
  modified_base 12: mod_base = OTHER; note = 2'-O-methyladenosine-3'-phosphate
  modified_base 13: mod_base = OTHER; note = 2'-O-methyluridine-3'-phosphate
  modified_base 14: mod_base = OTHER; note = 2'-deoxy-2'-fluorouridine-3'-phosphate
  modified_base 15: mod_base = OTHER; note = 2'-O-methyluridine-3'-phosphate
  modified_base 16: mod_base = OTHER; note = 2'-deoxy-2'-fluoroguanosine-3'-phosphate
  modified_base 17: mod_base = OTHER; note = 2'-O-methyladenosine-3'-phosphate
  modified_base 18: mod_base = OTHER; note = 2'-O-methylguanosine-3'-phosphate
  modified_base 19: mod_base = OTHER; note = 2'-O-methylguanosine-3'-phosphate
  modified_base 20: mod_base = OTHER; note = 2'-O-methylcytidine-3'-phosphate
  modified_base 21: mod_base = OTHER; note = 2'-O-methyladenosine-3'-phosphorothioate
  modified_base 22: mod_base = OTHER; note = 2'-O-methylcytidine-3'-phosphorothioate
  modified_base 23: mod_base = OTHER; note = 2'-O-methylguanosine
tattcttgtttatttgaggcacg

SEQ ID NO: 12921 - RNA, 23 nt, synthetic construct
  source 1..23: mol_type = other RNA
  modified_base 1: mod_base = OTHER; note = 2'-O-methyluridine-3'-phosphorothioate 5'-(E)-Vinylphosphonate
  modified_base 2: mod_base = OTHER; note = 2'-deoxy-2'-fluorocytidine-3'-phosphorothioate
  modified_base 3: mod_base = OTHER; note = 2'-O-methyladenosine-3'-phosphate
  modified_base 4: mod_base = OTHER; note = 2'-O-methyluridine-3'-phosphate
  modified_base 5: mod_base = OTHER; note = 2'-O-methyluridine-3'-phosphate
  modified_base 6: mod_base = OTHER; note = 2'-deoxy-2'-fluorocytidine-3'-phosphate
  modified_base 7: mod_base = OTHER; note = 2'-O-methyluridine-3'-phosphate
  modified_base 8: mod_base = OTHER; note = 2'-O-methyluridine-3'-phosphate
  modified_base 9: mod_base = OTHER; note = 2'-O-methylguanosine-3'-phosphate
  modified_base 10: mod_base = OTHER; note = 2'-O-methyluridine-3'-phosphate
  modified_base 11: mod_base = OTHER; note = 2'-O-methyluridine-3'-phosphate
  modified_base 12: mod_base = OTHER; note = 2'-O-methyluridine-3'-phosphate
  modified_base 13: mod_base = OTHER; note = 2'-O-methyladenosine-3'-phosphate
  modified_base 14: mod_base = OTHER; note = 2'-deoxy-2'-fluorouridine-3'-phosphate
  modified_base 15: mod_base = OTHER; note = 2'-O-methyluridine-3'-phosphate
  modified_base 16: mod_base = OTHER; note = 2'-deoxy-2'-fluorouridine-3'-phosphate
  modified_base 17: mod_base = OTHER; note = 2'-O-methylguanosine-3'-phosphate
  modified_base 18: mod_base = OTHER; note = 2'-O-methyladenosine-3'-phosphate
  modified_base 19: mod_base = OTHER; note = 2'-O-methylguanosine-3'-phosphate
  modified_base 20: mod_base = OTHER; note = 2'-O-methylguanosine-3'-phosphate
  modified_base 21: mod_base = OTHER; note = 2'-O-methylcytidine-3'-phosphorothioate
  modified_base 22: mod_base = OTHER; note = 2'-O-methyladenosine-3'-phosphorothioate
  modified_base 23: mod_base = OTHER; note = 2'-O-methylcytidine
tcattcttgtttatttgaggcac

SEQ ID NO: 12922 - RNA, 23 nt, synthetic construct
  source 1..23: mol_type = other RNA
  modified_base 1: mod_base = OTHER; note = 2'-O-methyluridine-3'-phosphorothioate 5'-(E)-Vinylphosphonate
  modified_base 2: mod_base = OTHER; note = 2'-deoxy-2'-fluorouridine-3'-phosphorothioate
  modified_base 3: mod_base = OTHER; note = 2'-O-methylcytidine-3'-phosphate
  modified_base 4: mod_base = OTHER; note = 2'-O-methyladenosine-3'-phosphate
  modified_base 5: mod_base = OTHER; note = 2'-O-methyluridine-3'-phosphate
  modified_base 6: mod_base = OTHER; note = 2'-deoxy-2'-fluorouridine-3'-phosphate
  modified_base 7: mod_base = OTHER; note = 2'-O-methylcytidine-3'-phosphate
  modified_base 8: mod_base = OTHER; note = 2'-O-methyluridine-3'-phosphate
  modified_base 9: mod_base = OTHER; note = 2'-O-methyluridine-3'-phosphate
  modified_base 10: mod_base = OTHER; note = 2'-O-methylguanosine-3'-phosphate
  modified_base 11: mod_base = OTHER; note = 2'-O-methyluridine-3'-phosphate
  modified_base 12: mod_base = OTHER; note = 2'-O-methyluridine-3'-phosphate
  modified_base 13: mod_base = OTHER; note = 2'-O-methyluridine-3'-phosphate
  modified_base 14: mod_base = OTHER; note = 2'-deoxy-2'-fluoroadenosine-3'-phosphate
  modified_base 15: mod_base = OTHER; note = 2'-O-methyluridine-3'-phosphate
  modified_base 16: mod_base = OTHER; note = 2'-deoxy-2'-fluorouridine-3'-phosphate
  modified_base 17: mod_base = OTHER; note = 2'-O-methyluridine-3'-phosphate
  modified_base 18: mod_base = OTHER; note = 2'-O-methylguanosine-3'-phosphate
  modified_base 19: mod_base = OTHER; note = 2'-O-methyladenosine-3'-phosphate
  modified_base 20: mod_base = OTHER; note = 2'-O-methylguanosine-3'-phosphate
  modified_base 21: mod_base = OTHER; note = 2'-O-methylguanosine-3'-phosphorothioate
  modified_base 22: mod_base = OTHER; note = 2'-O-methylcytidine-3'-phosphorothioate
  modified_base 23: mod_base = OTHER; note = 2'-O-methyladenosine
ttcattcttgtttatttgaggca

SEQ ID NO: 12923 - RNA, 23 nt, synthetic construct
  source 1..23: mol_type = other RNA
  modified_base 1: mod_base = OTHER; note = 2'-O-methyluridine-3'-phosphorothioate 5'-(E)-Vinylphosphonate
  modified_base 2: mod_base = OTHER; note = 2'-deoxy-2'-fluoroadenosine-3'-phosphorothioate
  modified_base 3: mod_base = OTHER; note = 2'-O-methyluridine-3'-phosphate
  modified_base 4: mod_base = OTHER; note = 2'-O-methylcytidine-3'-phosphate
  modified_base 5: mod_base = OTHER; note = 2'-O-methyladenosine-3'-phosphate
  modified_base 6: mod_base = OTHER; note = 2'-deoxy-2'-fluorouridine-3'-phosphate
  modified_base 7: mod_base = OTHER; note = 2'-O-methyluridine-3'-phosphate
  modified_base 8: mod_base = OTHER; note = 2'-O-methylcytidine-3'-phosphate
  modified_base 9: mod_base = OTHER; note = 2'-O-methyluridine-3'-phosphate
  modified_base 10: mod_base = OTHER; note = 2'-O-methyluridine-3'-phosphate
  modified_base 11: mod_base = OTHER; note = 2'-O-methylguanosine-3'-phosphate
  modified_base 12: mod_base = OTHER; note = 2'-O-methyluridine-3'-phosphate
  modified_base 13: mod_base = OTHER; note = 2'-O-methyluridine-3'-phosphate
  modified_base 14: mod_base = OTHER; note = 2'-deoxy-2'-fluorouridine-3'-phosphate
  modified_base 15: mod_base = OTHER; note = 2'-O-methyladenosine-3'-phosphate
  modified_base 16: mod_base = OTHER; note = 2'-deoxy-2'-fluorouridine-3'-phosphate
  modified_base 17: mod_base = OTHER; note = 2'-O-methyluridine-3'-phosphate
  modified_base 18: mod_base = OTHER; note = 2'-O-methyluridine-3'-phosphate
  modified_base 19: mod_base = OTHER; note = 2'-O-methylguanosine-3'-phosphate
  modified_base 20: mod_base = OTHER; note = 2'-O-methyladenosine-3'-phosphate
  modified_base 21: mod_base = OTHER; note = 2'-O-methylguanosine-3'-phosphorothioate
  modified_base 22: mod_base = OTHER; note = 2'-O-methylguanosine-3'-phosphorothioate
  modified_base 23: mod_base = OTHER; note = 2'-O-methylcytidine
tatcattcttgtttatttgaggc

SEQ ID NO: 12924 - RNA, 23 nt, synthetic construct
  source 1..23: mol_type = other RNA
  modified_base 1: mod_base = OTHER; note = 2'-O-methyluridine-3'-phosphorothioate 5'-(E)-Vinylphosphonate
  modified_base 2: mod_base = OTHER; note = 2'-deoxy-2'-fluorouridine-3'-phosphorothioate
  modified_base 3: mod_base = OTHER; note = 2'-O-methyladenosine-3'-phosphate
  modified_base 4: mod_base = OTHER; note = 2'-O-methyluridine-3'-phosphate
  modified_base 5: mod_base = OTHER; note = 2'-O-methylcytidine-3'-phosphate
  modified_base 6: mod_base = OTHER; note = 2'-deoxy-2'-fluoroadenosine-3'-phosphate
  modified_base 7: mod_base = OTHER; note = 2'-O-methyluridine-3'-phosphate
  modified_base 8: mod_base = OTHER; note = 2'-O-methyluridine-3'-phosphate
  modified_base 9: mod_base = OTHER; note = 2'-O-methylcytidine-3'-phosphate
  modified_base 10: mod_base = OTHER; note = 2'-O-methyluridine-3'-phosphate
  modified_base 11: mod_base = OTHER; note = 2'-O-methyluridine-3'-phosphate
  modified_base 12: mod_base = OTHER; note = 2'-O-methylguanosine-3'-phosphate
  modified_base 13: mod_base = OTHER; note = 2'-O-methyluridine-3'-phosphate
  modified_base 14: mod_base = OTHER; note = 2'-deoxy-2'-fluorouridine-3'-phosphate
  modified_base 15: mod_base = OTHER; note = 2'-O-methyluridine-3'-phosphate
  modified_base 16: mod_base = OTHER; note = 2'-deoxy-2'-fluoroadenosine-3'-phosphate
  modified_base 17: mod_base = OTHER; note = 2'-O-methyluridine-3'-phosphate
  modified_base 18: mod_base = OTHER; note = 2'-O-methyluridine-3'-phosphate
  modified_base 19: mod_base = OTHER; note = 2'-O-methyluridine-3'-phosphate
  modified_base 20: mod_base = OTHER; note = 2'-O-methylguanosine-3'-phosphate
  modified_base 21: mod_base = OTHER; note = 2'-O-methyladenosine-3'-phosphorothioate
  modified_base 22: mod_base = OTHER; note = 2'-O-methylguanosine-3'-phosphorothioate
  modified_base 23: mod_base = OTHER; note = 2'-O-methylguanosine
ttatcattcttgtttatttgagg

SEQ ID NO: 12925 - RNA, 23 nt, synthetic construct
  source 1..23: mol_type = other RNA
  modified_base 1: mod_base = OTHER; note = 2'-O-methyluridine-3'-phosphorothioate 5'-(E)-Vinylphosphonate
  modified_base 2: mod_base = OTHER; note = 2'-deoxy-2'-fluorocytidine-3'-phosphorothioate
  modified_base 3: mod_base = OTHER; note = 2'-O-methyladenosine-3'-phosphate
  modified_base 4: mod_base = OTHER; note = 2'-O-methylguanosine-3'-phosphate
  modified_base 5: mod_base = OTHER; note = 2'-O-methylguanosine-3'-phosphate
  modified_base 6: mod_base = OTHER; note = 2'-deoxy-2'-fluoroadenosine-3'-phosphate
  modified_base 7: mod_base = OTHER; note = 2'-O-methyladenosine-3'-phosphate
  modified_base 8: mod_base = OTHER; note = 2'-O-methyladenosine-3'-phosphate
  modified_base 9: mod_base = OTHER; note = 2'-O-methyluridine-3'-phosphate
  modified_base 10: mod_base = OTHER; note = 2'-O-methyladenosine-3'-phosphate
  modified_base 11: mod_base = OTHER; note = 2'-O-methyluridine-3'-phosphate
  modified_base 12: mod_base = OTHER; note = 2'-O-methylcytidine-3'-phosphate
  modified_base 13: mod_base = OTHER; note = 2'-O-methyladenosine-3'-phosphate
  modified_base 14: mod_base = OTHER; note = 2'-deoxy-2'-fluorouridine-3'-phosphate
  modified_base 15: mod_base = OTHER; note = 2'-O-methyluridine-3'-phosphate
  modified_base 16: mod_base = OTHER; note = 2'-deoxy-2'-fluorocytidine-3'-phosphate
  modified_base 17: mod_base = OTHER; note = 2'-O-methyluridine-3'-phosphate
  modified_base 18: mod_base = OTHER; note = 2'-O-methyluridine-3'-phosphate
  modified_base 19: mod_base = OTHER; note = 2'-O-methylguanosine-3'-phosphate
  modified_base 20: mod_base = OTHER; note = 2'-O-methyluridine-3'-phosphate
  modified_base 21: mod_base = OTHER; note = 2'-O-methyluridine-3'-phosphorothioate
  modified_base 22: mod_base = OTHER; note = 2'-O-methyluridine-3'-phosphorothioate
  modified_base 23: mod_base = OTHER; note = 2'-O-methyladenosine
tcaggaaatatcattcttgttta

SEQ ID NO: 12926 - RNA, 23 nt, synthetic construct
  source 1..23: mol_type = other RNA
  modified_base 1: mod_base = OTHER; note = 2'-O-methyluridine-3'-phosphorothioate 5'-(E)-Vinylphosphonate
  modified_base 2: mod_base = OTHER; note = 2'-deoxy-2'-fluoroadenosine-3'-phosphorothioate
  modified_base 3: mod_base = OTHER; note = 2'-O-methylcytidine-3'-phosphate
  modified_base 4: mod_base = OTHER; note = 2'-O-methyladenosine-3'-phosphate
  modified_base 5: mod_base = OTHER; note = 2'-O-methylguanosine-3'-phosphate
  modified_base 6: mod_base = OTHER; note = 2'-deoxy-2'-fluoroguanosine-3'-phosphate
  modified_base 7: mod_base = OTHER; note = 2'-O-methyladenosine-3'-phosphate
  modified_base 8: mod_base = OTHER; note = 2'-O-methyladenosine-3'-phosphate
  modified_base 9: mod_base = OTHER; note = 2'-O-methyladenosine-3'-phosphate
  modified_base 10: mod_base = OTHER; note = 2'-O-methyluridine-3'-phosphate
  modified_base 11: mod_base = OTHER; note = 2'-O-methyladenosine-3'-phosphate
  modified_base 12: mod_base = OTHER; note = 2'-O-methyluridine-3'-phosphate
  modified_base 13: mod_base = OTHER; note = 2'-O-methylcytidine-3'-phosphate
  modified_base 14: mod_base = OTHER; note = 2'-deoxy-2'-fluoroadenosine-3'-phosphate
  modified_base 15: mod_base = OTHER; note = 2'-O-methyluridine-3'-phosphate
  modified_base 16: mod_base = OTHER; note = 2'-deoxy-2'-fluorouridine-3'-phosphate
  modified_base 17: mod_base = OTHER; note = 2'-O-methylcytidine-3'-phosphate
  modified_base 18: mod_base = OTHER; note = 2'-O-methyluridine-3'-phosphate
  modified_base 19: mod_base = OTHER; note = 2'-O-methyluridine-3'-phosphate
  modified_base 20: mod_base = OTHER; note = 2'-O-methylguanosine-3'-phosphate
  modified_base 21: mod_base = OTHER; note = 2'-O-methyluridine-3'-phosphorothioate
  modified_base 22: mod_base = OTHER; note = 2'-O-methyluridine-3'-phosphorothioate
  modified_base 23: mod_base = OTHER; note = 2'-O-methyluridine
tacaggaaatatcattcttgttt

SEQ ID NO: 12927 - RNA, 23 nt, synthetic construct
  source 1..23: mol_type = other RNA
  modified_base 1: mod_base = OTHER; note = 2'-O-methyluridine-3'-phosphorothioate 5'-(E)-Vinylphosphonate
  modified_base 2: mod_base = OTHER; note = 2'-deoxy-2'-fluoroadenosine-3'-phosphorothioate
  modified_base 3: mod_base = OTHER; note = 2'-O-methyladenosine-3'-phosphate
  modified_base 4: mod_base = OTHER; note = 2'-O-methylcytidine-3'-phosphate
  modified_base 5: mod_base = OTHER; note = 2'-O-methyladenosine-3'-phosphate
  modified_base 6: mod_base = OTHER; note = 2'-deoxy-2'-fluoroguanosine-3'-phosphate
  modified_base 7: mod_base = OTHER; note = 2'-O-methylguanosine-3'-phosphate
  modified_base 8: mod_base = OTHER; note = 2'-O-methyladenosine-3'-phosphate
  modified_base 9: mod_base = OTHER; note = 2'-O-methyladenosine-3'-phosphate
  modified_base 10: mod_base = OTHER; note = 2'-O-methyladenosine-3'-phosphate
  modified_base 11: mod_base = OTHER; note = 2'-O-methyluridine-3'-phosphate
  modified_base 12: mod_base = OTHER; note = 2'-O-methyladenosine-3'-phosphate
  modified_base 13: mod_base = OTHER; note = 2'-O-methyluridine-3'-phosphate
  modified_base 14: mod_base = OTHER; note = 2'-deoxy-2'-fluorocytidine-3'-phosphate
  modified_base 15: mod_base = OTHER; note = 2'-O-methyladenosine-3'-phosphate
  modified_base 16: mod_base = OTHER; note = 2'-deoxy-2'-fluorouridine-3'-phosphate
  modified_base 17: mod_base = OTHER; note = 2'-O-methyluridine-3'-phosphate
  modified_base 18: mod_base = OTHER; note = 2'-O-methylcytidine-3'-phosphate
  modified_base 19: mod_base = OTHER; note = 2'-O-methyluridine-3'-phosphate
  modified_base 20: mod_base = OTHER; note = 2'-O-methyluridine-3'-phosphate
  modified_base 21: mod_base = OTHER; note = 2'-O-methylguanosine-3'-phosphorothioate
  modified_base 22: mod_base = OTHER; note = 2'-O-methyluridine-3'-phosphorothioate
  modified_base 23: mod_base = OTHER; note = 2'-O-methyluridine
taacaggaaatatcattcttgtt

SEQ ID NO: 12928 - RNA, 23 nt, synthetic construct
  source 1..23: mol_type = other RNA
  modified_base 1: mod_base = OTHER; note = 2'-O-methyluridine-3'-phosphorothioate 5'-(E)-Vinylphosphonate
  modified_base 2: mod_base = OTHER; note = 2'-deoxy-2'-fluoroadenosine-3'-phosphorothioate
  modified_base 3: mod_base = OTHER; note = 2'-O-methyladenosine-3'-phosphate
  modified_base 4: mod_base = OTHER; note = 2'-O-methyladenosine-3'-phosphate
  modified_base 5: mod_base = OTHER; note = 2'-O-methylcytidine-3'-phosphate
  modified_base 6: mod_base = OTHER; note = 2'-deoxy-2'-fluoroadenosine-3'-phosphate
  modified_base 7: mod_base = OTHER; note = 2'-O-methylguanosine-3'-phosphate
  modified_base 8: mod_base = OTHER; note = 2'-O-methylguanosine-3'-phosphate
  modified_base 9: mod_base = OTHER; note = 2'-O-methyladenosine-3'-phosphate
  modified_base 10: mod_base = OTHER; note = 2'-O-methyladenosine-3'-phosphate
  modified_base 11: mod_base = OTHER; note = 2'-O-methyladenosine-3'-phosphate
  modified_base 12: mod_base = OTHER; note = 2'-O-methyluridine-3'-phosphate
  modified_base 13: mod_base = OTHER; note = 2'-O-methyladenosine-3'-phosphate
  modified_base 14: mod_base = OTHER; note = 2'-deoxy-2'-fluorouridine-3'-phosphate
  modified_base 15: mod_base = OTHER; note = 2'-O-methylcytidine-3'-phosphate
  modified_base 16: mod_base = OTHER; note = 2'-deoxy-2'-fluoroadenosine-3'-phosphate
  modified_base 17: mod_base = OTHER; note = 2'-O-methyluridine-3'-phosphate
  modified_base 18: mod_base = OTHER; note = 2'-O-methyluridine-3'-phosphate
  modified_base 19: mod_base = OTHER; note = 2'-O-methylcytidine-3'-phosphate
  modified_base 20: mod_base = OTHER; note = 2'-O-methyluridine-3'-phosphate
  modified_base 21: mod_base = OTHER; note = 2'-O-methyluridine-3'-phosphorothioate
  modified_base 22: mod_base = OTHER; note = 2'-O-methylguanosine-3'-phosphorothioate
  modified_base 23: mod_base = OTHER; note = 2'-O-methyluridine
taaacaggaaatatcattcttgt

SEQ ID NO: 12929 - RNA, 23 nt, synthetic construct
  source 1..23: mol_type = other RNA
  modified_base 1: mod_base = OTHER; note = 2'-O-methyluridine-3'-phosphorothioate 5'-(E)-Vinylphosphonate
  modified_base 2: mod_base = OTHER; note = 2'-deoxy-2'-fluoroadenosine-3'-phosphorothioate
  modified_base 3: mod_base = OTHER; note = 2'-O-methyladenosine-3'-phosphate
  modified_base 4: mod_base = OTHER; note = 2'-O-methyluridine-3'-phosphate
  modified_base 5: mod_base = OTHER; note = 2'-O-methyladenosine-3'-phosphate
  modified_base 6: mod_base = OTHER; note = 2'-deoxy-2'-fluoroadenosine-3'-phosphate
  modified_base 7: mod_base = OTHER; note = 2'-O-methylguanosine-3'-phosphate
  modified_base 8: mod_base = OTHER; note = 2'-O-methylcytidine-3'-phosphate
  modified_base 9: mod_base = OTHER; note = 2'-O-methyladenosine-3'-phosphate
  modified_base 10: mod_base = OTHER; note = 2'-O-methyluridine-3'-phosphate
  modified_base 11: mod_base = OTHER; note = 2'-O-methyladenosine-3'-phosphate
  modified_base 12: mod_base = OTHER; note = 2'-O-methyluridine-3'-phosphate
  modified_base 13: mod_base = OTHER; note = 2'-O-methyluridine-3'-phosphate
  modified_base 14: mod_base = OTHER; note = 2'-deoxy-2'-fluorouridine-3'-phosphate
  modified_base 15: mod_base = OTHER; note = 2'-O-methyladenosine-3'-phosphate
  modified_base 16: mod_base = OTHER; note = 2'-deoxy-2'-fluorocytidine-3'-phosphate
  modified_base 17: mod_base = OTHER; note = 2'-O-methylcytidine-3'-phosphate
  modified_base 18: mod_base = OTHER; note = 2'-O-methylcytidine-3'-phosphate
  modified_base 19: mod_base = OTHER; note = 2'-O-methyladenosine-3'-phosphate
  modified_base 20: mod_base = OTHER; note = 2'-O-methyladenosine-3'-phosphate
  modified_base 21: mod_base = OTHER; note = 2'-O-methylcytidine-3'-phosphorothioate
  modified_base 22: mod_base = OTHER; note = 2'-O-methyladenosine-3'-phosphorothioate
  modified_base 23: mod_base = OTHER; note = 2'-O-methyluridine
taataagcatatttacccaacat

SEQ ID NO: 12930 - RNA, 23 nt, synthetic construct
  source 1..23: mol_type = other RNA
  modified_base 1: mod_base = OTHER; note = 2'-O-methyluridine-3'-phosphorothioate 5'-(E)-Vinylphosphonate
  modified_base 2: mod_base = OTHER; note = 2'-deoxy-2'-fluorocytidine-3'-phosphorothioate
  modified_base 3: mod_base = OTHER; note = 2'-O-methyladenosine-3'-phosphate
  modified_base 4: mod_base = OTHER; note = 2'-O-methyluridine-3'-phosphate
  modified_base 5: mod_base = OTHER; note = 2'-O-methyladenosine-3'-phosphate
  modified_base 6: mod_base = OTHER; note = 2'-deoxy-2'-fluorouridine-3'-phosphate
  modified_base 7: mod_base = OTHER; note = 2'-O-methyluridine-3'-phosphate
  modified_base 8: mod_base = OTHER; note = 2'-O-methyluridine-3'-phosphate
  modified_base 9: mod_base = OTHER; note = 2'-O-methyladenosine-3'-phosphate
  modified_base 10: mod_base = OTHER; note = 2'-O-methylcytidine-3'-phosphate
  modified_base 11: mod_base = OTHER; note = 2'-O-methylcytidine-3'-phosphate
  modified_base 12: mod_base = OTHER; note = 2'-O-methylcytidine-3'-phosphate
  modified_base 13: mod_base = OTHER; note = 2'-O-methyladenosine-3'-phosphate
  modified_base 14: mod_base = OTHER; note = 2'-deoxy-2'-fluoroadenosine-3'-phosphate
  modified_base 15: mod_base = OTHER; note = 2'-O-methylcytidine-3'-phosphate
  modified_base 16: mod_base = OTHER; note = 2'-deoxy-2'-fluoroadenosine-3'-phosphate
  modified_base 17: mod_base = OTHER; note = 2'-O-methyluridine-3'-phosphate
  modified_base 18: mod_base = OTHER; note = 2'-O-methyladenosine-3'-phosphate
  modified_base 19: mod_base = OTHER; note = 2'-O-methyladenosine-3'-phosphate
  modified_base 20: mod_base = OTHER; note = 2'-O-methylguanosine-3'-phosphate
  modified_base 21: mod_base = OTHER; note = 2'-O-methyluridine-3'-phosphorothioate
  modified_base 22: mod_base = OTHER; note = 2'-O-methyladenosine-3'-phosphorothioate
  modified_base 23: mod_base = OTHER; note = 2'-O-methyladenosine
tcatatttacccaacataagtaa

SEQ ID NO: 12931 - RNA, 23 nt, synthetic construct
  source 1..23: mol_type = other RNA
  modified_base 1: mod_base = OTHER; note = 2'-O-methyluridine-3'-phosphorothioate 5'-(E)-Vinylphosphonate
  modified_base 2: mod_base = OTHER; note = 2'-deoxy-2'-fluoroguanosine-3'-phosphorothioate
  modified_base 3: mod_base = OTHER; note = 2'-O-methylcytidine-3'-phosphate
  modified_base 4: mod_base = OTHER; note = 2'-O-methyladenosine-3'-phosphate
  modified_base 5: mod_base = OTHER; note = 2'-O-methyluridine-3'-phosphate
  modified_base 6: mod_base = OTHER; note = 2'-deoxy-2'-fluoroadenosine-3'-phosphate
  modified_base 7: mod_base = OTHER; note = 2'-O-methyluridine-3'-phosphate
  modified_base 8: mod_base = OTHER; note = 2'-O-methyluridine-3'-phosphate
  modified_base 9: mod_base = OTHER; note = 2'-O-methyluridine-3'-phosphate
  modified_base 10: mod_base = OTHER; note = 2'-O-methyladenosine-3'-phosphate
  modified_base 11: mod_base = OTHER; note = 2'-O-methylcytidine-3'-phosphate
  modified_base 12: mod_base = OTHER; note = 2'-O-methylcytidine-3'-phosphate
  modified_base 13: mod_base = OTHER; note = 2'-O-methylcytidine-3'-phosphate
  modified_base 14: mod_base = OTHER; note = 2'-deoxy-2'-fluoroadenosine-3'-phosphate
  modified_base 15: mod_base = OTHER; note = 2'-O-methyladenosine-3'-phosphate
  modified_base 16: mod_base = OTHER; note = 2'-deoxy-2'-fluorocytidine-3'-phosphate
  modified_base 17: mod_base = OTHER; note = 2'-O-methyladenosine-3'-phosphate
  modified_base 18: mod_base = OTHER; note = 2'-O-methyluridine-3'-phosphate
  modified_base 19: mod_base = OTHER; note = 2'-O-methyladenosine-3'-phosphate
  modified_base 20: mod_base = OTHER; note = 2'-O-methyladenosine-3'-phosphate
  modified_base 21: mod_base = OTHER; note = 2'-O-methylguanosine-3'-phosphorothioate
  modified_base 22: mod_base = OTHER; note = 2'-O-methyluridine-3'-phosphorothioate
  modified_base 23: mod_base = OTHER; note = 2'-O-methyladenosine
tgcatatttacccaacataagta

SEQ ID NO: 12932 - RNA, 23 nt, synthetic construct
  source 1..23: mol_type = other RNA
  modified_base 1: mod_base = OTHER; note = 2'-O-methyluridine-3'-phosphorothioate 5'-(E)-Vinylphosphonate
  modified_base 2: mod_base = OTHER; note = 2'-deoxy-2'-fluoroadenosine-3'-phosphorothioate
  modified_base 3: mod_base = OTHER; note = 2'-O-methylguanosine-3'-phosphate
  modified_base 4: mod_base = OTHER; note = 2'-O-methylcytidine-3'-phosphate
  modified_base 5: mod_base = OTHER; note = 2'-O-methyladenosine-3'-phosphate
  modified_base 6: mod_base = OTHER; note = 2'-deoxy-2'-fluorouridine-3'-phosphate
  modified_base 7: mod_base = OTHER; note = 2'-O-methyladenosine-3'-phosphate
  modified_base 8: mod_base = OTHER; note = 2'-O-methyluridine-3'-phosphate
  modified_base 9: mod_base = OTHER; note = 2'-O-methyluridine-3'-phosphate
  modified_base 10: mod_base = OTHER; note = 2'-O-methyluridine-3'-phosphate
  modified_base 11: mod_base = OTHER; note = 2'-O-methyladenosine-3'-phosphate
  modified_base 12: mod_base = OTHER; note = 2'-O-methylcytidine-3'-phosphate
  modified_base 13: mod_base = OTHER; note = 2'-O-methylcytidine-3'-phosphate
  modified_base 14: mod_base = OTHER; note = 2'-deoxy-2'-fluorocytidine-3'-phosphate
  modified_base 15: mod_base = OTHER; note = 2'-O-methyladenosine-3'-phosphate
  modified_base 16: mod_base = OTHER; note = 2'-deoxy-2'-fluoroadenosine-3'-phosphate
  modified_base 17: mod_base = OTHER; note = 2'-O-methylcytidine-3'-phosphate
  modified_base 18: mod_base = OTHER; note = 2'-O-methyladenosine-3'-phosphate
  modified_base 19: mod_base = OTHER; note = 2'-O-methyluridine-3'-phosphate
  modified_base 20: mod_base = OTHER; note = 2'-O-methyladenosine-3'-phosphate
  modified_base 21: mod_base = OTHER; note = 2'-O-methyladenosine-3'-phosphorothioate
  modified_base 22: mod_base = OTHER; note = 2'-O-methylguanosine-3'-phosphorothioate
  modified_base 23: mod_base = OTHER; note = 2'-O-methyluridine
tagcatatttacccaacataagt

SEQ ID NO: 12933 - RNA, 23 nt, synthetic construct
  source 1..23: mol_type = other RNA
  modified_base 1: mod_base = OTHER; note = 2'-O-methyluridine-3'-phosphorothioate 5'-(E)-Vinylphosphonate
  modified_base 2: mod_base = OTHER; note = 2'-deoxy-2'-fluoroadenosine-3'-phosphorothioate
  modified_base 3: mod_base = OTHER; note = 2'-O-methyladenosine-3'-phosphate
  modified_base 4: mod_base = OTHER; note = 2'-O-methylguanosine-3'-phosphate
  modified_base 5: mod_base = OTHER; note = 2'-O-methylcytidine-3'-phosphate
  modified_base 6: mod_base = OTHER; note = 2'-deoxy-2'-fluoroadenosine-3'-phosphate
  modified_base 7: mod_base = OTHER; note = 2'-O-methyluridine-3'-phosphate
  modified_base 8: mod_base = OTHER; note = 2'-O-methyladenosine-3'-phosphate
  modified_base 9: mod_base = OTHER; note = 2'-O-methyluridine-3'-phosphate
  modified_base 10: mod_base = OTHER; note = 2'-O-methyluridine-3'-phosphate
  modified_base 11: mod_base = OTHER; note = 2'-O-methyluridine-3'-phosphate
  modified_base 12: mod_base = OTHER; note = 2'-O-methyladenosine-3'-phosphate
  modified_base 13: mod_base = OTHER; note = 2'-O-methylcytidine-3'-phosphate
  modified_base 14: mod_base = OTHER; note = 2'-deoxy-2'-fluorocytidine-3'-phosphate
  modified_base 15: mod_base = OTHER; note = 2'-O-methylcytidine-3'-phosphate
  modified_base 16: mod_base = OTHER; note = 2'-deoxy-2'-fluoroadenosine-3'-phosphate
  modified_base 17: mod_base = OTHER; note = 2'-O-methyladenosine-3'-phosphate
  modified_base 18: mod_base = OTHER; note = 2'-O-methylcytidine-3'-phosphate
  modified_base 19: mod_base = OTHER; note = 2'-O-methyladenosine-3'-phosphate
  modified_base 20: mod_base = OTHER; note = 2'-O-methyluridine-3'-phosphate
  modified_base 21: mod_base = OTHER; note = 2'-O-methyladenosine-3'-phosphorothioate
  modified_base 22: mod_base = OTHER; note = 2'-O-methyladenosine-3'-phosphorothioate
  modified_base 23: mod_base = OTHER; note = 2'-O-methylguanosine
taagcatatttacccaacataag

SEQ ID NO: 12934 - RNA, 23 nt, synthetic construct
  source 1..23: mol_type = other RNA
  modified_base 1: mod_base = OTHER; note = 2'-O-methyluridine-3'-phosphorothioate 5'-(E)-Vinylphosphonate
  modified_base 2: mod_base = OTHER; note = 2'-deoxy-2'-fluorouridine-3'-phosphorothioate
  modified_base 3: mod_base = OTHER; note = 2'-O-methyladenosine-3'-phosphate
  modified_base 4: mod_base = OTHER; note = 2'-O-methyladenosine-3'-phosphate
  modified_base 5: mod_base = OTHER; note = 2'-O-methylguanosine-3'-phosphate
  modified_base 6: mod_base = OTHER; note = 2'-deoxy-2'-fluorocytidine-3'-phosphate
  modified_base 7: mod_base = OTHER; note = 2'-O-methyladenosine-3'-phosphate
  modified_base 8: mod_base = OTHER; note = 2'-O-methyluridine-3'-phosphate
  modified_base 9: mod_base = OTHER; note = 2'-O-methyladenosine-3'-phosphate
  modified_base 10: mod_base = OTHER; note = 2'-O-methyluridine-3'-phosphate
  modified_base 11: mod_base = OTHER; note = 2'-O-methyluridine-3'-phosphate
  modified_base 12: mod_base = OTHER; note = 2'-O-methyluridine-3'-phosphate
  modified_base 13: mod_base = OTHER; note = 2'-O-methyladenosine-3'-phosphate
  modified_base 14: mod_base = OTHER; note = 2'-deoxy-2'-fluorocytidine-3'-phosphate
  modified_base 15: mod_base = OTHER; note = 2'-O-methylcytidine-3'-phosphate
  modified_base 16: mod_base = OTHER; note = 2'-deoxy-2'-fluorocytidine-3'-phosphate
  modified_base 17: mod_base = OTHER; note = 2'-O-methyladenosine-3'-phosphate
  modified_base 18: mod_base = OTHER; note = 2'-O-methyladenosine-3'-phosphate
  modified_base 19: mod_base = OTHER; note = 2'-O-methylcytidine-3'-phosphate
  modified_base 20: mod_base = OTHER; note = 2'-O-methyladenosine-3'-phosphate
  modified_base 21: mod_base = OTHER; note = 2'-O-methyluridine-3'-phosphorothioate
  modified_base 22: mod_base = OTHER; note = 2'-O-methyladenosine-3'-phosphorothioate
  modified_base 23: mod_base = OTHER; note = 2'-O-methyladenosine
ttaagcatatttacccaacataa

SEQ ID NO: 12935 - RNA, 23 nt, synthetic construct
  source 1..23: mol_type = other RNA
  modified_base 1: mod_base = OTHER; note = 2'-O-methyluridine-3'-phosphorothioate 5'-(E)-Vinylphosphonate
  modified_base 2: mod_base = OTHER; note = 2'-deoxy-2'-fluoroadenosine-3'-phosphorothioate
  modified_base 3: mod_base = OTHER; note = 2'-O-methyluridine-3'-phosphate
  modified_base 4: mod_base = OTHER; note = 2'-O-methyladenosine-3'-phosphate
  modified_base 5: mod_base = OTHER; note = 2'-O-methyladenosine-3'-phosphate
  modified_base 6: mod_base = OTHER; note = 2'-deoxy-2'-fluoroguanosine-3'-phosphate
  modified_base 7: mod_base = OTHER; note = 2'-O-methylcytidine-3'-phosphate
  modified_base 8: mod_base = OTHER; note = 2'-O-methyladenosine-3'-phosphate
  modified_base 9: mod_base = OTHER; note = 2'-O-methyluridine-3'-phosphate
  modified_base 10: mod_base = OTHER; note = 2'-O-methyladenosine-3'-phosphate
  modified_base 11: mod_base = OTHER; note = 2'-O-methyluridine-3'-phosphate
  modified_base 12: mod_base = OTHER; note = 2'-O-methyluridine-3'-phosphate
  modified_base 13: mod_base = OTHER; note = 2'-O-methyluridine-3'-phosphate
  modified_base 14: mod_base = OTHER; note = 2'-deoxy-2'-fluoroadenosine-3'-phosphate
  modified_base 15: mod_base = OTHER; note = 2'-O-methylcytidine-3'-phosphate
  modified_base 16: mod_base = OTHER; note = 2'-deoxy-2'-fluorocytidine-3'-phosphate
  modified_base 17: mod_base = OTHER; note = 2'-O-methylcytidine-3'-phosphate
  modified_base 18: mod_base = OTHER; note = 2'-O-methyladenosine-3'-phosphate
  modified_base 19: mod_base = OTHER; note = 2'-O-methyladenosine-3'-phosphate
  modified_base 20: mod_base = OTHER; note = 2'-O-methylcytidine-3'-phosphate
  modified_base 21: mod_base = OTHER; note = 2'-O-methyladenosine-3'-phosphorothioate
  modified_base 22: mod_base = OTHER; note = 2'-O-methyluridine-3'-phosphorothioate
  modified_base 23: mod_base = OTHER; note = 2'-O-methyladenosine
tataagcatatttacccaacata

SEQ ID NO: 12936 - RNA, 23 nt, synthetic construct
  source 1..23: mol_type = other RNA
  modified_base 1: mod_base = OTHER; note = 2'-O-methyluridine-3'-phosphorothioate 5'-(E)-Vinylphosphonate
  modified_base 2: mod_base = OTHER; note = 2'-deoxy-2'-fluorocytidine-3'-phosphorothioate
  modified_base 3: mod_base = OTHER; note = 2'-O-methyladenosine-3'-phosphate
  modified_base 4: mod_base = OTHER; note = 2'-O-methylguanosine-3'-phosphate
  modified_base 5: mod_base = OTHER; note = 2'-O-methyladenosine-3'-phosphate
  modified_base 6: mod_base = OTHER; note = 2'-deoxy-2'-fluoroguanosine-3'-phosphate
  modified_base 7: mod_base = OTHER; note = 2'-O-methyluridine-3'-phosphate
  modified_base 8: mod_base = OTHER; note = 2'-O-methylguanosine-3'-phosphate
  modified_base 9: mod_base = OTHER; note = 2'-O-methyladenosine-3'-phosphate
  modified_base 10: mod_base = OTHER; note = 2'-O-methyladenosine-3'-phosphate
  modified_base 11: mod_base = OTHER; note = 2'-O-methyladenosine-3'-phosphate
  modified_base 12: mod_base = OTHER; note = 2'-O-methylguanosine-3'-phosphate
  modified_base 13: mod_base = OTHER; note = 2'-O-methyluridine-3'-phosphate
  modified_base 14: mod_base = OTHER; note = 2'-deoxy-2'-fluorouridine-3'-phosphate
  modified_base 15: mod_base = OTHER; note = 2'-O-methylguanosine-3'-phosphate
  modified_base 16: mod_base = OTHER; note = 2'-deoxy-2'-fluoroadenosine-3'-phosphate
  modified_base 17: mod_base = OTHER; note = 2'-O-methyladenosine-3'-phosphate
  modified_base 18: mod_base = OTHER; note = 2'-O-methylcytidine-3'-phosphate
  modified_base 19: mod_base = OTHER; note = 2'-O-methylcytidine-3'-phosphate
  modified_base 20: mod_base = OTHER; note = 2'-O-methyladenosine-3'-phosphate
  modified_base 21: mod_base = OTHER; note = 2'-O-methyladenosine-3'-phosphorothioate
  modified_base 22: mod_base = OTHER; note = 2'-O-methyluridine-3'-phosphorothioate
  modified_base 23: mod_base = OTHER; note = 2'-O-methyladenosine
tcagagtgaaagttgaaccaata

SEQ ID NO: 12937 - RNA, 23 nt, synthetic construct
  source 1..23: mol_type = other RNA
  modified_base 1: mod_base = OTHER; note = 2'-O-methyluridine-3'-phosphorothioate 5'-(E)-Vinylphosphonate
  modified_base 2: mod_base = OTHER; note = 2'-deoxy-2'-fluoroadenosine-3'-phosphorothioate
  modified_base 3: mod_base = OTHER; note = 2'-O-methyluridine-3'-phosphate
  modified_base 4: mod_base = OTHER; note = 2'-O-methyluridine-3'-phosphate
  modified_base 5: mod_base = OTHER; note = 2'-O-methyluridine-3'-phosphate
  modified_base 6: mod_base = OTHER; note = 2'-deoxy-2'-fluorocytidine-3'-phosphate
  modified_base 7: mod_base = OTHER; note = 2'-O-methyluridine-3'-phosphate
  modified_base 8: mod_base = OTHER; note = 2'-O-methyluridine-3'-phosphate
  modified_base 9: mod_base = OTHER; note = 2'-O-methylcytidine-3'-phosphate
  modified_base 10: mod_base = OTHER; note = 2'-O-methyladenosine-3'-phosphate
  modified_base 11: mod_base = OTHER; note = 2'-O-methylguanosine-3'-phosphate
  modified_base 12: mod_base = OTHER; note = 2'-O-methyladenosine-3'-phosphate
  modified_base 13: mod_base = OTHER; note = 2'-O-methylguanosine-3'-phosphate
  modified_base 14: mod_base = OTHER; note = 2'-deoxy-2'-fluorouridine-3'-phosphate
  modified_base 15: mod_base = OTHER; note = 2'-O-methylguanosine-3'-phosphate
  modified_base 16: mod_base = OTHER; note = 2'-deoxy-2'-fluoroadenosine-3'-phosphate
  modified_base 17: mod_base = OTHER; note = 2'-O-methyladenosine-3'-phosphate
  modified_base 18: mod_base = OTHER; note = 2'-O-methyladenosine-3'-phosphate
  modified_base 19: mod_base = OTHER; note = 2'-O-methylguanosine-3'-phosphate
  modified_base 20: mod_base = OTHER; note = 2'-O-methyluridine-3'-phosphate
  modified_base 21: mod_base = OTHER; note = 2'-O-methyluridine-3'-phosphorothioate
  modified_base 22: mod_base = OTHER; note = 2'-O-methylguanosine-3'-phosphorothioate
  modified_base 23: mod_base = OTHER; note = 2'-O-methyladenosine
tatttcttcagagtgaaagttga

SEQ ID NO: 12938 - RNA, 23 nt, synthetic construct
  source 1..23: mol_type = other RNA
  modified_base 1: mod_base = OTHER; note = 2'-O-methyluridine-3'-phosphorothioate 5'-(E)-Vinylphosphonate
  modified_base 2: mod_base = OTHER; note = 2'-deoxy-2'-fluoroadenosine-3'-phosphorothioate
  modified_base 3: mod_base = OTHER; note = 2'-O-methylcytidine-3'-phosphate
  modified_base 4: mod_base = OTHER; note = 2'-O-methyladenosine-3'-phosphate
  modified_base 5: mod_base = OTHER; note = 2'-O-methyluridine-3'-phosphate
  modified_base 6: mod_base = OTHER; note = 2'-deoxy-2'-fluoroadenosine-3'-phosphate
  modified_base 7: mod_base = OTHER; note = 2'-O-methylcytidine-3'-phosphate
  modified_base 8: mod_base = OTHER; note = 2'-O-methylguanosine-3'-phosphate
  modified_base 9: mod_base = OTHER; note = 2'-O-methylguanosine-3'-phosphate
  modified_base 10: mod_base = OTHER; note = 2'-O-methyladenosine-3'-phosphate
  modified_base 11: mod_base = OTHER; note = 2'-O-methyluridine-3'-phosphate
  modified_base 12: mod_base = OTHER; note = 2'-O-methyluridine-3'-phosphate
  modified_base 13: mod_base = OTHER; note = 2'-O-methyluridine-3'-phosphate
  modified_base 14: mod_base = OTHER; note = 2'-deoxy-2'-fluorocytidine-3'-phosphate
  modified_base 15: mod_base = OTHER; note = 2'-O-methyluridine-3'-phosphate
  modified_base 16: mod_base = OTHER; note = 2'-deoxy-2'-fluorouridine-3'-phosphate
  modified_base 17: mod_base = OTHER; note = 2'-O-methylcytidine-3'-phosphate
  modified_base 18: mod_base = OTHER; note = 2'-O-methyladenosine-3'-phosphate
  modified_base 19: mod_base = OTHER; note = 2'-O-methylguanosine-3'-phosphate
  modified_base 20: mod_base = OTHER; note = 2'-O-methyladenosine-3'-phosphate
  modified_base 21: mod_base = OTHER; note = 2'-O-methylguanosine-3'-phosphorothioate
  modified_base 22: mod_base = OTHER; note = 2'-O-methyluridine-3'-phosphorothioate
  modified_base 23: mod_base = OTHER; note = 2'-O-methylguanosine
tacatacggatttcttcagagtg

SEQ ID NO: 12939 - RNA, 23 nt, synthetic construct
  source 1..23: mol_type = other RNA
  modified_base 1: mod_base = OTHER; note = 2'-O-methyluridine-3'-phosphorothioate 5'-(E)-Vinylphosphonate
  modified_base 2: mod_base = OTHER; note = 2'-deoxy-2'-fluorouridine-3'-phosphorothioate
  modified_base 3: mod_base = OTHER; note = 2'-O-methyladenosine-3'-phosphate
  modified_base 4: mod_base = OTHER; note = 2'-O-methyladenosine-3'-phosphate
  modified_base 5: mod_base = OTHER; note = 2'-O-methylcytidine-3'-phosphate
  modified_base 6: mod_base = OTHER; note = 2'-deoxy-2'-fluoroadenosine-3'-phosphate
  modified_base 7: mod_base = OTHER; note = 2'-O-methyluridine-3'-phosphate
  modified_base 8: mod_base = OTHER; note = 2'-O-methyladenosine-3'-phosphate
  modified_base 9: mod_base = OTHER; note = 2'-O-methylcytidine-3'-phosphate
  modified_base 10: mod_base = OTHER; note = 2'-O-methylguanosine-3'-phosphate
  modified_base 11: mod_base = OTHER; note = 2'-O-methylguanosine-3'-phosphate
  modified_base 12: mod_base = OTHER; note = 2'-O-methyladenosine-3'-phosphate
  modified_base 13: mod_base = OTHER; note = 2'-O-methyluridine-3'-phosphate
  modified_base 14: mod_base = OTHER; note = 2'-deoxy-2'-fluorouridine-3'-phosphate
  modified_base 15: mod_base = OTHER; note = 2'-O-methyluridine-3'-phosphate
  modified_base 16: mod_base = OTHER; note = 2'-deoxy-2'-fluorocytidine-3'-phosphate
  modified_base 17: mod_base = OTHER; note = 2'-O-methyluridine-3'-phosphate
  modified_base 18: mod_base = OTHER; note = 2'-O-methyluridine-3'-phosphate
  modified_base 19: mod_base = OTHER; note = 2'-O-methylcytidine-3'-phosphate
  modified_base 20: mod_base = OTHER; note = 2'-O-methyladenosine-3'-phosphate
  modified_base 21: mod_base = OTHER; note = 2'-O-methylguanosine-3'-phosphorothioate
  modified_base 22: mod_base = OTHER; note = 2'-O-methyladenosine-3'-phosphorothioate
  modified_base 23: mod_base = OTHER; note = 2'-O-methylguanosine
ttaacatacggatttcttcagag

SEQ ID NO: 12940 - RNA, 23 nt, synthetic construct
  source 1..23: mol_type = other RNA
  modified_base 1: mod_base = OTHER; note = 2'-O-methyluridine-3'-phosphorothioate 5'-(E)-Vinylphosphonate
  modified_base 2: mod_base = OTHER; note = 2'-deoxy-2'-fluoroguanosine-3'-phosphorothioate
  modified_base 3: mod_base = OTHER; note = 2'-O-methyladenosine-3'-phosphate
  modified_base 4: mod_base = OTHER; note = 2'-O-methylguanosine-3'-phosphate
  modified_base 5: mod_base = OTHER; note = 2'-O-methyluridine-3'-phosphate
  modified_base 6: mod_base = OTHER; note = 2'-deoxy-2'-fluorocytidine-3'-phosphate
  modified_base 7: mod_base = OTHER; note = 2'-O-methyladenosine-3'-phosphate
  modified_base 8: mod_base = OTHER; note = 2'-O-methyluridine-3'-phosphate
  modified_base 9: mod_base = OTHER; note = 2'-O-methyladenosine-3'-phosphate
  modified_base 10: mod_base = OTHER; note = 2'-O-methylguanosine-3'-phosphate
  modified_base 11: mod_base = OTHER; note = 2'-O-methyluridine-3'-phosphate
  modified_base 12: mod_base = OTHER; note = 2'-O-methyluridine-3'-phosphate
  modified_base 13: mod_base = OTHER; note = 2'-O-methyladenosine-3'-phosphate
  modified_base 14: mod_base = OTHER; note = 2'-deoxy-2'-fluoroadenosine-3'-phosphate
  modified_base 15: mod_base = OTHER; note = 2'-O-methyladenosine-3'-phosphate
  modified_base 16: mod_base = OTHER; note = 2'-deoxy-2'-fluorocytidine-3'-phosphate
  modified_base 17: mod_base = OTHER; note = 2'-O-methyladenosine-3'-phosphate
  modified_base 18: mod_base = OTHER; note = 2'-O-methyladenosine-3'-phosphate
  modified_base 19: mod_base = OTHER; note = 2'-O-methylcytidine-3'-phosphate
  modified_base 20: mod_base = OTHER; note = 2'-O-methyladenosine-3'-phosphate
  modified_base 21: mod_base = OTHER; note = 2'-O-methylcytidine-3'-phosphorothioate
  modified_base 22: mod_base = OTHER; note = 2'-O-methyladenosine-3'-phosphorothioate
  modified_base 23: mod_base = OTHER; note = 2'-O-methyladenosine
tgagtcatagttaaacaacacaa

SEQ ID NO: 12941 - RNA, 23 nt, synthetic construct
  source 1..23: mol_type = other RNA
  modified_base 1: mod_base = OTHER; note = 2'-O-methyluridine-3'-phosphorothioate 5'-(E)-Vinylphosphonate
  modified_base 2: mod_base = OTHER; note = 2'-deoxy-2'-fluoroadenosine-3'-phosphorothioate
  modified_base 3: mod_base = OTHER; note = 2'-O-methyladenosine-3'-phosphate
  modified_base 4: mod_base = OTHER; note = 2'-O-methyluridine-3'-phosphate
  modified_base 5: mod_base = OTHER; note = 2'-O-methyladenosine-3'-phosphate
  modified_base 6: mod_base = OTHER; note = 2'-deoxy-2'-fluorouridine-3'-phosphate
  modified_base 7: mod_base = OTHER; note = 2'-O-methyladenosine-3'-phosphate
  modified_base 8: mod_base = OTHER; note = 2'-O-methyladenosine-3'-phosphate
  modified_base 9: mod_base = OTHER; note = 2'-O-methylguanosine-3'-phosphate
  modified_base 10: mod_base = OTHER; note = 2'-O-methyladenosine-3'-phosphate
  modified_base 11: mod_base = OTHER; note = 2'-O-methylcytidine-3'-phosphate
  modified_base 12: mod_base = OTHER; note = 2'-O-methyluridine-3'-phosphate
  modified_base 13: mod_base = OTHER; note = 2'-O-methyladenosine-3'-phosphate
  modified_base 14: mod_base = OTHER; note = 2'-deoxy-2'-fluorocytidine-3'-phosphate
  modified_base 15: mod_base = OTHER; note = 2'-O-methyluridine-3'-phosphate
  modified_base 16: mod_base = OTHER; note = 2'-deoxy-2'-fluorocytidine-3'-phosphate
  modified_base 17: mod_base = OTHER; note = 2'-O-methyladenosine-3'-phosphate
  modified_base 18: mod_base = OTHER; note = 2'-O-methylguanosine-3'-phosphate
  modified_base 19: mod_base = OTHER; note = 2'-O-methyluridine-3'-phosphate
  modified_base 20: mod_base = OTHER; note = 2'-O-methyluridine-3'-phosphate
  modified_base 21: mod_base = OTHER; note = 2'-O-methyladenosine-3'-phosphorothioate
  modified_base 22: mod_base = OTHER; note = 2'-O-methylguanosine-3'-phosphorothioate
  modified_base 23: mod_base = OTHER; note = 2'-O-methylguanosine
taatataagactactcagttagg

SEQ ID NO: 12942 - RNA, 23 nt, synthetic construct
  source 1..23: mol_type = other RNA
  modified_base 1: mod_base = OTHER; note = 2'-O-methyluridine-3'-phosphorothioate 5'-(E)-Vinylphosphonate
  modified_base 2: mod_base = OTHER; note = 2'-deoxy-2'-fluoroguanosine-3'-phosphorothioate
  modified_base 3: mod_base = OTHER; note = 2'-O-methyladenosine-3'-phosphate
  modified_base 4: mod_base = OTHER; note = 2'-O-methylcytidine-3'-phosphate
  modified_base 5: mod_base = OTHER; note = 2'-O-methyluridine-3'-phosphate
  modified_base 6: mod_base = OTHER; note = 2'-deoxy-2'-fluoroadenosine-3'-phosphate
  modified_base 7: mod_base = OTHER; note = 2'-O-methylcytidine-3'-phosphate
  modified_base 8: mod_base = OTHER; note = 2'-O-methyluridine-3'-phosphate
  modified_base 9: mod_base = OTHER; note = 2'-O-methylcytidine-3'-phosphate
  modified_base 10: mod_base = OTHER; note = 2'-O-methyladenosine-3'-phosphate
  modified_base 11: mod_base = OTHER; note = 2'-O-methylguanosine-3'-phosphate
  modified_base 12: mod_base = OTHER; note = 2'-O-methyluridine-3'-phosphate
  modified_base 13: mod_base = OTHER; note = 2'-O-methyluridine-3'-phosphate
  modified_base 14: mod_base = OTHER; note = 2'-deoxy-2'-fluoroadenosine-3'-phosphate
  modified_base 15: mod_base = OTHER; note = 2'-O-methylguanosine-3'-phosphate
  modified_base 16: mod_base = OTHER; note = 2'-deoxy-2'-fluoroguanosine-3'-phosphate
  modified_base 17: mod_base = OTHER; note = 2'-O-methyladenosine-3'-phosphate
  modified_base 18: mod_base = OTHER; note = 2'-O-methylguanosine-3'-phosphate
  modified_base 19: mod_base = OTHER; note = 2'-O-methyluridine-3'-phosphate
  modified_base 20: mod_base = OTHER; note = 2'-O-methylcytidine-3'-phosphate
  modified_base 21: mod_base = OTHER; note = 2'-O-methyladenosine-3'-phosphorothioate
  modified_base 22: mod_base = OTHER; note = 2'-O-methyluridine-3'-phosphorothioate
  modified_base 23: mod_base = OTHER; note = 2'-O-methyladenosine
tgactactcagttaggagtcata

SEQ ID NO: 12943 - RNA, 23 nt, synthetic construct
  source 1..23: mol_type = other RNA
  modified_base 1: mod_base = OTHER; note = 2'-O-methyluridine-3'-phosphorothioate 5'-(E)-Vinylphosphonate
  modified_base 2: mod_base = OTHER; note = 2'-deoxy-2'-fluoroadenosine-3'-phosphorothioate
  modified_base 3: mod_base = OTHER; note = 2'-O-methylguanosine-3'-phosphate
  modified_base 4: mod_base = OTHER; note = 2'-O-methyladenosine-3'-phosphate
  modified_base 5: mod_base = OTHER; note = 2'-O-methylcytidine-3'-phosphate
  modified_base 6: mod_base = OTHER; note = 2'-deoxy-2'-fluorouridine-3'-phosphate
  modified_base 7: mod_base = OTHER; note = 2'-O-methyladenosine-3'-phosphate
  modified_base 8: mod_base = OTHER; note = 2'-O-methylcytidine-3'-phosphate
  modified_base 9: mod_base = OTHER; note = 2'-O-methyluridine-3'-phosphate
  modified_base 10: mod_base = OTHER; note = 2'-O-methylcytidine-3'-phosphate
  modified_base 11: mod_base = OTHER; note = 2'-O-methyladenosine-3'-phosphate
  modified_base 12: mod_base = OTHER; note = 2'-O-methylguanosine-3'-phosphate
  modified_base 13: mod_base = OTHER; note = 2'-O-methyluridine-3'-phosphate
  modified_base 14: mod_base = OTHER; note = 2'-deoxy-2'-fluorouridine-3'-phosphate
  modified_base 15: mod_base = OTHER; note = 2'-O-methyladenosine-3'-phosphate
  modified_base 16: mod_base = OTHER; note = 2'-deoxy-2'-fluoroguanosine-3'-phosphate
  modified_base 17: mod_base = OTHER; note = 2'-O-methylguanosine-3'-phosphate
  modified_base 18: mod_base = OTHER; note = 2'-O-methyladenosine-3'-phosphate
  modified_base 19: mod_base = OTHER; note = 2'-O-methylguanosine-3'-phosphate
  modified_base 20: mod_base = OTHER; note = 2'-O-methyluridine-3'-phosphate
  modified_base 21: mod_base = OTHER; note = 2'-O-methylcytidine-3'-phosphorothioate
  modified_base 22: mod_base = OTHER; note = 2'-O-methyladenosine-3'-phosphorothioate
  modified_base 23: mod_base = OTHER; note = 2'-O-methyluridine
tagactactcagttaggagtcat

SEQ ID NO: 12944 - RNA, 23 nt, synthetic construct
  source 1..23: mol_type = other RNA
  modified_base 1: mod_base = OTHER; note = 2'-O-methyluridine-3'-phosphorothioate 5'-(E)-Vinylphosphonate
  modified_base 2: mod_base = OTHER; note = 2'-deoxy-2'-fluoroadenosine-3'-phosphorothioate
  modified_base 3: mod_base = OTHER; note = 2'-O-methyladenosine-3'-phosphate
  modified_base 4: mod_base = OTHER; note = 2'-O-methylguanosine-3'-phosphate
  modified_base 5: mod_base = OTHER; note = 2'-O-methyladenosine-3'-phosphate
  modified_base 6: mod_base = OTHER; note = 2'-deoxy-2'-fluorocytidine-3'-phosphate
  modified_base 7: mod_base = OTHER; note = 2'-O-methyluridine-3'-phosphate
  modified_base 8: mod_base = OTHER; note = 2'-O-methyladenosine-3'-phosphate
  modified_base 9: mod_base = OTHER; note = 2'-O-methylcytidine-3'-phosphate
  modified_base 10: mod_base = OTHER; note = 2'-O-methyluridine-3'-phosphate
  modified_base 11: mod_base = OTHER; note = 2'-O-methylcytidine-3'-phosphate
  modified_base 12: mod_base = OTHER; note = 2'-O-methyladenosine-3'-phosphate
  modified_base 13: mod_base = OTHER; note = 2'-O-methylguanosine-3'-phosphate
  modified_base 14: mod_base = OTHER; note = 2'-deoxy-2'-fluorouridine-3'-phosphate
  modified_base 15: mod_base = OTHER; note = 2'-O-methyluridine-3'-phosphate
  modified_base 16: mod_base = OTHER; note = 2'-deoxy-2'-fluoroadenosine-3'-phosphate
  modified_base 17: mod_base = OTHER; note = 2'-O-methylguanosine-3'-phosphate
  modified_base 18: mod_base = OTHER; note = 2'-O-methylguanosine-3'-phosphate
  modified_base 19: mod_base = OTHER; note = 2'-O-methyladenosine-3'-phosphate
  modified_base 20: mod_base = OTHER; note = 2'-O-methylguanosine-3'-phosphate
  modified_base 21: mod_base = OTHER; note = 2'-O-methyluridine-3'-phosphorothioate
  modified_base 22: mod_base = OTHER; note = 2'-O-methylcytidine-3'-phosphorothioate
  modified_base 23: mod_base = OTHER; note = 2'-O-methyladenosine
taagactactcagttaggagtca

SEQ ID NO: 12945 - RNA, 23 nt, synthetic construct
  source 1..23: mol_type = other RNA
  modified_base 1: mod_base = OTHER; note = 2'-O-methyluridine-3'-phosphorothioate 5'-(E)-Vinylphosphonate
  modified_base 2: mod_base = OTHER; note = 2'-deoxy-2'-fluorouridine-3'-phosphorothioate
  modified_base 3: mod_base = OTHER; note = 2'-O-methyladenosine-3'-phosphate
  modified_base 4: mod_base = OTHER; note = 2'-O-methyladenosine-3'-phosphate
  modified_base 5: mod_base = OTHER; note = 2'-O-methylguanosine-3'-phosphate
  modified_base 6: mod_base = OTHER; note = 2'-deoxy-2'-fluoroadenosine-3'-phosphate
  modified_base 7: mod_base = OTHER; note = 2'-O-methylcytidine-3'-phosphate
  modified_base 8: mod_base = OTHER; note = 2'-O-methyluridine-3'-phosphate
  modified_base 9: mod_base = OTHER; note = 2'-O-methyladenosine-3'-phosphate
  modified_base 10: mod_base = OTHER; note = 2'-O-methylcytidine-3'-phosphate
  modified_base 11: mod_base = OTHER; note = 2'-O-methyluridine-3'-phosphate
  modified_base 12: mod_base = OTHER; note = 2'-O-methylcytidine-3'-phosphate
  modified_base 13: mod_base = OTHER; note = 2'-O-methyladenosine-3'-phosphate
  modified_base 14: mod_base = OTHER; note = 2'-deoxy-2'-fluoroguanosine-3'-phosphate
  modified_base 15: mod_base = OTHER; note = 2'-O-methyluridine-3'-phosphate
  modified_base 16: mod_base = OTHER; note = 2'-deoxy-2'-fluorouridine-3'-phosphate
  modified_base 17: mod_base = OTHER; note = 2'-O-methyladenosine-3'-phosphate
  modified_base 18: mod_base = OTHER; note = 2'-O-methylguanosine-3'-phosphate
  modified_base 19: mod_base = OTHER; note = 2'-O-methylguanosine-3'-phosphate
  modified_base 20: mod_base = OTHER; note = 2'-O-methyladenosine-3'-phosphate
  modified_base 21: mod_base = OTHER; note = 2'-O-methylguanosine-3'-phosphorothioate
  modified_base 22: mod_base = OTHER; note = 2'-O-methyluridine-3'-phosphorothioate
  modified_base 23: mod_base = OTHER; note = 2'-O-methylcytidine
ttaagactactcagttaggagtc

SEQ ID NO: 12946 - RNA, 23 nt, synthetic construct
  source 1..23: mol_type = other RNA
  modified_base 1: mod_base = OTHER; note = 2'-O-methyluridine-3'-phosphorothioate 5'-(E)-Vinylphosphonate
  modified_base 2: mod_base = OTHER; note = 2'-deoxy-2'-fluoroadenosine-3'-phosphorothioate
  modified_base 3: mod_base = OTHER; note = 2'-O-methyluridine-3'-phosphate
  modified_base 4: mod_base = OTHER; note = 2'-O-methyladenosine-3'-phosphate
  modified_base 5: mod_base = OTHER; note = 2'-O-methyladenosine-3'-phosphate
  modified_base 6: mod_base = OTHER; note = 2'-deoxy-2'-fluoroguanosine-3'-phosphate
  modified_base 7: mod_base = OTHER; note = 2'-O-methyladenosine-3'-phosphate
  modified_base 8: mod_base = OTHER; note = 2'-O-methylcytidine-3'-phosphate
  modified_base 9: mod_base = OTHER; note = 2'-O-methyluridine-3'-phosphate
  modified_base 10: mod_base = OTHER; note = 2'-O-methyladenosine-3'-phosphate
  modified_base 11: mod_base = OTHER; note = 2'-O-methylcytidine-3'-phosphate
  modified_base 12: mod_base = OTHER; note = 2'-O-methyluridine-3'-phosphate
  modified_base 13: mod_base = OTHER; note = 2'-O-methylcytidine-3'-phosphate
  modified_base 14: mod_base = OTHER; note = 2'-deoxy-2'-fluoroadenosine-3'-phosphate
  modified_base 15: mod_base = OTHER; note = 2'-O-methylguanosine-3'-phosphate
  modified_base 16: mod_base = OTHER; note = 2'-deoxy-2'-fluorouridine-3'-phosphate
  modified_base 17: mod_base = OTHER; note = 2'-O-methyluridine-3'-phosphate
  modified_base 18: mod_base = OTHER; note = 2'-O-methyladenosine-3'-phosphate
  modified_base 19: mod_base = OTHER; note = 2'-O-methylguanosine-3'-phosphate
  modified_base 20: mod_base = OTHER; note = 2'-O-methylguanosine-3'-phosphate
  modified_base 21: mod_base = OTHER; note = 2'-O-methyladenosine-3'-phosphorothioate
  modified_base 22: mod_base = OTHER; note = 2'-O-methylguanosine-3'-phosphorothioate
  modified_base 23: mod_base = OTHER; note = 2'-O-methyluridine
tataagactactcagttaggagt

SEQ ID NO: 12947 - RNA, 23 nt, synthetic construct
  source 1..23: mol_type = other RNA
  modified_base 1: mod_base = OTHER; note = 2'-O-methyluridine-3'-phosphorothioate 5'-(E)-Vinylphosphonate
  modified_base 2: mod_base = OTHER; note = 2'-deoxy-2'-fluorouridine-3'-phosphorothioate
  modified_base 3: mod_base = OTHER; note = 2'-O-methyladenosine-3'-phosphate
  modified_base 4: mod_base = OTHER; note = 2'-O-methyluridine-3'-phosphate
  modified_base 5: mod_base = OTHER; note = 2'-O-methyladenosine-3'-phosphate
  modified_base 6: mod_base = OTHER; note = 2'-deoxy-2'-fluoroadenosine-3'-phosphate
  modified_base 7: mod_base = OTHER; note = 2'-O-methylguanosine-3'-phosphate
  modified_base 8: mod_base = OTHER; note = 2'-O-methyladenosine-3'-phosphate
  modified_base 9: mod_base = OTHER; note = 2'-O-methylcytidine-3'-phosphate
  modified_base 10: mod_base = OTHER; note = 2'-O-methyluridine-3'-phosphate
  modified_base 11: mod_base = OTHER; note = 2'-O-methyladenosine-3'-phosphate
  modified_base 12: mod_base = OTHER; note = 2'-O-methylcytidine-3'-phosphate
  modified_base 13: mod_base = OTHER; note = 2'-O-methyluridine-3'-phosphate
  modified_base 14: mod_base = OTHER; note = 2'-deoxy-2'-fluorocytidine-3'-phosphate
  modified_base 15: mod_base = OTHER; note = 2'-O-methyladenosine-3'-phosphate
  modified_base 16: mod_base = OTHER; note = 2'-deoxy-2'-fluoroguanosine-3'-phosphate
  modified_base 17: mod_base = OTHER; note = 2'-O-methyluridine-3'-phosphate
  modified_base 18: mod_base = OTHER; note = 2'-O-methyluridine-3'-phosphate
  modified_base 19: mod_base = OTHER; note = 2'-O-methyladenosine-3'-phosphate
  modified_base 20: mod_base = OTHER; note = 2'-O-methylguanosine-3'-phosphate
  modified_base 21: mod_base = OTHER; note = 2'-O-methylguanosine-3'-phosphorothioate
  modified_base 22: mod_base = OTHER; note = 2'-O-methyladenosine-3'-phosphorothioate
  modified_base 23: mod_base = OTHER; note = 2'-O-methylguanosine
ttataagactactcagttaggag

SEQ ID NO: 12948 - RNA, 23 nt, synthetic construct
  source 1..23: mol_type = other RNA
  modified_base 1: mod_base = OTHER; note = 2'-O-methyluridine-3'-phosphorothioate 5'-(E)-Vinylphosphonate
  modified_base 2: mod_base = OTHER; note = 2'-deoxy-2'-fluoroadenosine-3'-phosphorothioate
  modified_base 3: mod_base = OTHER; note = 2'-O-methyluridine-3'-phosphate
  modified_base 4: mod_base = OTHER; note = 2'-O-methyladenosine-3'-phosphate
  modified_base 5: mod_base = OTHER; note = 2'-O-methyluridine-3'-phosphate
  modified_base 6: mod_base = OTHER; note = 2'-deoxy-2'-fluoroadenosine-3'-phosphate
  modified_base 7: mod_base = OTHER; note = 2'-O-methyladenosine-3'-phosphate
  modified_base 8: mod_base = OTHER; note = 2'-O-methylguanosine-3'-phosphate
  modified_base 9: mod_base = OTHER; note = 2'-O-methyladenosine-3'-phosphate
  modified_base 10: mod_base = OTHER; note = 2'-O-methylcytidine-3'-phosphate
  modified_base 11: mod_base = OTHER; note = 2'-O-methyluridine-3'-phosphate
  modified_base 12: mod_base = OTHER; note = 2'-O-methyladenosine-3'-phosphate
  modified_base 13: mod_base = OTHER; note = 2'-O-methylcytidine-3'-phosphate
  modified_base 14: mod_base = OTHER; note = 2'-deoxy-2'-fluorouridine-3'-phosphate
  modified_base 15: mod_base = OTHER; note = 2'-O-methylcytidine-3'-phosphate
  modified_base 16: mod_base = OTHER; note = 2'-deoxy-2'-fluoroadenosine-3'-phosphate
  modified_base 17: mod_base = OTHER; note = 2'-O-methylguanosine-3'-phosphate
  modified_base 18: mod_base = OTHER; note = 2'-O-methyluridine-3'-phosphate
  modified_base 19: mod_base = OTHER; note = 2'-O-methyluridine-3'-phosphate
  modified_base 20: mod_base = OTHER; note = 2'-O-methyladenosine-3'-phosphate
  modified_base 21: mod_base = OTHER; note = 2'-O-methylguanosine-3'-phosphorothioate
  modified_base 22: mod_base = OTHER; note = 2'-O-methylguanosine-3'-phosphorothioate
  modified_base 23: mod_base = OTHER; note = 2'-O-methyladenosine
tatataagactactcagttagga

SEQ ID NO: 12949 - RNA, 23 nt, synthetic construct
  source 1..23: mol_type = other RNA
  modified_base 1: mod_base = OTHER; note = 2'-O-methyluridine-3'-phosphorothioate 5'-(E)-Vinylphosphonate
  modified_base 2: mod_base = OTHER; note = 2'-deoxy-2'-fluoroadenosine-3'-phosphorothioate
  modified_base 3: mod_base = OTHER; note = 2'-O-methyladenosine-3'-phosphate
  modified_base 4: mod_base = OTHER; note = 2'-O-methyladenosine-3'-phosphate
  modified_base 5: mod_base = OTHER; note = 2'-O-methyluridine-3'-phosphate
  modified_base 6: mod_base = OTHER; note = 2'-deoxy-2'-fluoroadenosine-3'-phosphate
  modified_base 7: mod_base = OTHER; note = 2'-O-methyluridine-3'-phosphate
  modified_base 8: mod_base = OTHER; note = 2'-O-methyladenosine-3'-phosphate
  modified_base 9: mod_base = OTHER; note = 2'-O-methyladenosine-3'-phosphate
  modified_base 10: mod_base = OTHER; note = 2'-O-methylguanosine-3'-phosphate
  modified_base 11: mod_base = OTHER; note = 2'-O-methyladenosine-3'-phosphate
  modified_base 12: mod_base = OTHER; note = 2'-O-methylcytidine-3'-phosphate
  modified_base 13: mod_base = OTHER; note = 2'-O-methyluridine-3'-phosphate
  modified_base 14: mod_base = OTHER; note = 2'-deoxy-2'-fluoroadenosine-3'-phosphate
  modified_base 15: mod_base = OTHER; note = 2'-O-methylcytidine-3'-phosphate
  modified_base 16: mod_base = OTHER; note = 2'-deoxy-2'-fluorouridine-3'-phosphate
  modified_base 17: mod_base = OTHER; note = 2'-O-methylcytidine-3'-phosphate
  modified_base 18: mod_base = OTHER; note = 2'-O-methyladenosine-3'-phosphate
  modified_base 19: mod_base = OTHER; note = 2'-O-methylguanosine-3'-phosphate
  modified_base 20: mod_base = OTHER; note = 2'-O-methyluridine-3'-phosphate
  modified_base 21: mod_base = OTHER; note = 2'-O-methyluridine-3'-phosphorothioate
  modified_base 22: mod_base = OTHER; note = 2'-O-methyladenosine-3'-phosphorothioate
  modified_base 23: mod_base = OTHER; note = 2'-O-methylguanosine
taaatataagactactcagttag

SEQ ID NO: 12950 - RNA, 23 nt, synthetic construct
  source 1..23: mol_type = other RNA
  modified_base 1: mod_base = OTHER; note = 2'-O-methyluridine-3'-phosphorothioate 5'-(E)-Vinylphosphonate
  modified_base 2: mod_base = OTHER; note = 2'-deoxy-2'-fluoroguanosine-3'-phosphorothioate
  modified_base 3: mod_base = OTHER; note = 2'-O-methyladenosine-3'-phosphate
  modified_base 4: mod_base = OTHER; note = 2'-O-methyladenosine-3'-phosphate
  modified_base 5: mod_base = OTHER; note = 2'-O-methyladenosine-3'-phosphate
  modified_base 6: mod_base = OTHER; note = 2'-deoxy-2'-fluorouridine-3'-phosphate
  modified_base 7: mod_base = OTHER; note = 2'-O-methyladenosine-3'-phosphate
  modified_base 8: mod_base = OTHER; note = 2'-O-methyluridine-3'-phosphate
  modified_base 9: mod_base = OTHER; note = 2'-O-methyladenosine-3'-phosphate
  modified_base 10: mod_base = OTHER; note = 2'-O-methyladenosine-3'-phosphate
  modified_base 11: mod_base = OTHER; note = 2'-O-methylguanosine-3'-phosphate
  modified_base 12: mod_base = OTHER; note = 2'-O-methyladenosine-3'-phosphate
  modified_base 13: mod_base = OTHER; note = 2'-O-methylcytidine-3'-phosphate
  modified_base 14: mod_base = OTHER; note = 2'-deoxy-2'-fluorouridine-3'-phosphate
  modified_base 15: mod_base = OTHER; note = 2'-O-methyladenosine-3'-phosphate
  modified_base 16: mod_base = OTHER; note = 2'-deoxy-2'-fluorocytidine-3'-phosphate
  modified_base 17: mod_base = OTHER; note = 2'-O-methyluridine-3'-phosphate
  modified_base 18: mod_base = OTHER; note = 2'-O-methylcytidine-3'-phosphate
  modified_base 19: mod_base = OTHER; note = 2'-O-methyladenosine-3'-phosphate
  modified_base 20: mod_base = OTHER; note = 2'-O-methylguanosine-3'-phosphate
  modified_base 21: mod_base = OTHER; note = 2'-O-methyluridine-3'-phosphorothioate
  modified_base 22: mod_base = OTHER; note = 2'-O-methyluridine-3'-phosphorothioate
  modified_base 23: mod_base = OTHER; note = 2'-O-methyladenosine
tgaaatataagactactcagtta

SEQ ID NO: 12951 - RNA, 23 nt, synthetic construct
  source 1..23: mol_type = other RNA
  modified_base 1: mod_base = OTHER; note = 2'-O-methyluridine-3'-phosphorothioate 5'-(E)-Vinylphosphonate
  modified_base 2: mod_base = OTHER; note = 2'-deoxy-2'-fluorouridine-3'-phosphorothioate
  modified_base 3: mod_base = OTHER; note = 2'-O-methylguanosine-3'-phosphate
  modified_base 4: mod_base = OTHER; note = 2'-O-methyladenosine-3'-phosphate
  modified_base 5: mod_base = OTHER; note = 2'-O-methyladenosine-3'-phosphate
  modified_base 6: mod_base = OTHER; note = 2'-deoxy-2'-fluoroadenosine-3'-phosphate
  modified_base 7: mod_base = OTHER; note = 2'-O-methyluridine-3'-phosphate
  modified_base 8: mod_base = OTHER; note = 2'-O-methyladenosine-3'-phosphate
  modified_base 9: mod_base = OTHER; note = 2'-O-methyluridine-3'-phosphate
  modified_base 10: mod_base = OTHER; note = 2'-O-methyladenosine-3'-phosphate
  modified_base 11: mod_base = OTHER; note = 2'-O-methyladenosine-3'-phosphate
  modified_base 12: mod_base = OTHER; note = 2'-O-methylguanosine-3'-phosphate
  modified_base 13: mod_base = OTHER; note = 2'-O-methyladenosine-3'-phosphate
  modified_base 14: mod_base = OTHER; note = 2'-deoxy-2'-fluorocytidine-3'-phosphate
  modified_base 15: mod_base = OTHER; note = 2'-O-methyluridine-3'-phosphate
  modified_base 16: mod_base = OTHER; note = 2'-deoxy-2'-fluoroadenosine-3'-phosphate
  modified_base 17: mod_base = OTHER; note = 2'-O-methylcytidine-3'-phosphate
  modified_base 18: mod_base = OTHER; note = 2'-O-methyluridine-3'-phosphate
  modified_base 19: mod_base = OTHER; note = 2'-O-methylcytidine-3'-phosphate
  modified_base 20: mod_base = OTHER; note = 2'-O-methyladenosine-3'-phosphate
  modified_base 21: mod_base = OTHER; note = 2'-O-methylguanosine-3'-phosphorothioate
  modified_base 22: mod_base = OTHER; note = 2'-O-methyluridine-3'-phosphorothioate
  modified_base 23: mod_base = OTHER; note = 2'-O-methyluridine
ttgaaatataagactactcagtt

SEQ ID NO: 12952 - RNA, 23 nt, synthetic construct
  source 1..23: mol_type = other RNA
  modified_base 1: mod_base = OTHER; note = 2'-O-methyluridine-3'-phosphorothioate 5'-(E)-Vinylphosphonate
  modified_base 2: mod_base = OTHER; note = 2'-deoxy-2'-fluorouridine-3'-phosphorothioate
  modified_base 3: mod_base = OTHER; note = 2'-O-methyluridine-3'-phosphate
  modified_base 4: mod_base = OTHER; note = 2'-O-methylguanosine-3'-phosphate
  modified_base 5: mod_base = OTHER; note = 2'-O-methyladenosine-3'-phosphate
  modified_base 6: mod_base = OTHER; note = 2'-deoxy-2'-fluoroadenosine-3'-phosphate
  modified_base 7: mod_base = OTHER; note = 2'-O-methyladenosine-3'-phosphate
  modified_base 8: mod_base = OTHER; note = 2'-O-methyluridine-3'-phosphate
  modified_base 9: mod_base = OTHER; note = 2'-O-methyladenosine-3'-phosphate
  modified_base 10: mod_base = OTHER; note = 2'-O-methyluridine-3'-phosphate
  modified_base 11: mod_base = OTHER; note = 2'-O-methyladenosine-3'-phosphate
  modified_base 12: mod_base = OTHER; note = 2'-O-methyladenosine-3'-phosphate
  modified_base 13: mod_base = OTHER; note = 2'-O-methylguanosine-3'-phosphate
  modified_base 14: mod_base = OTHER; note = 2'-deoxy-2'-fluoroadenosine-3'-phosphate
  modified_base 15: mod_base = OTHER; note = 2'-O-methylcytidine-3'-phosphate
  modified_base 16: mod_base = OTHER; note = 2'-deoxy-2'-fluorouridine-3'-phosphate
  modified_base 17: mod_base = OTHER; note = 2'-O-methyladenosine-3'-phosphate
  modified_base 18: mod_base = OTHER; note = 2'-O-methylcytidine-3'-phosphate
  modified_base 19: mod_base = OTHER; note = 2'-O-methyluridine-3'-phosphate
  modified_base 20: mod_base = OTHER; note = 2'-O-methylcytidine-3'-phosphate
  modified_base 21: mod_base = OTHER; note = 2'-O-methyladenosine-3'-phosphorothioate
  modified_base 22: mod_base = OTHER; note = 2'-O-methylguanosine-3'-phosphorothioate
  modified_base 23: mod_base = OTHER; note = 2'-O-methyluridine
tttgaaatataagactactcagt

SEQ ID NO: 12953 - RNA, 23 nt, synthetic construct
  source 1..23: mol_type = other RNA
  modified_base 1: mod_base = OTHER; note = 2'-O-methyluridine-3'-phosphorothioate 5'-(E)-Vinylphosphonate
  modified_base 2: mod_base = OTHER; note = 2'-deoxy-2'-fluoroadenosine-3'-phosphorothioate
  modified_base 3: mod_base = OTHER; note = 2'-O-methyluridine-3'-phosphate
  modified_base 4: mod_base = OTHER; note = 2'-O-methyluridine-3'-phosphate
  modified_base 5: mod_base = OTHER; note = 2'-O-methylguanosine-3'-phosphate
  modified_base 6: mod_base = OTHER; note = 2'-deoxy-2'-fluoroadenosine-3'-phosphate
  modified_base 7: mod_base = OTHER; note = 2'-O-methyladenosine-3'-phosphate
  modified_base 8: mod_base = OTHER; note = 2'-O-methyladenosine-3'-phosphate
  modified_base 9: mod_base = OTHER; note = 2'-O-methyluridine-3'-phosphate
  modified_base 10: mod_base = OTHER; note = 2'-O-methyladenosine-3'-phosphate
  modified_base 11: mod_base = OTHER; note = 2'-O-methyluridine-3'-phosphate
  modified_base 12: mod_base = OTHER; note = 2'-O-methyladenosine-3'-phosphate
  modified_base 13: mod_base = OTHER; note = 2'-O-methyladenosine-3'-phosphate
  modified_base 14: mod_base = OTHER; note = 2'-deoxy-2'-fluoroguanosine-3'-phosphate
  modified_base 15: mod_base = OTHER; note = 2'-O-methyladenosine-3'-phosphate
  modified_base 16: mod_base = OTHER; note = 2'-deoxy-2'-fluorocytidine-3'-phosphate
  modified_base 17: mod_base = OTHER; note = 2'-O-methyluridine-3'-phosphate
  modified_base 18: mod_base = OTHER; note = 2'-O-methyladenosine-3'-phosphate
  modified_base 19: mod_base = OTHER; note = 2'-O-methylcytidine-3'-phosphate
  modified_base 20: mod_base = OTHER; note = 2'-O-methyluridine-3'-phosphate
  modified_base 21: mod_base = OTHER; note = 2'-O-methylcytidine-3'-phosphorothioate
  modified_base 22: mod_base = OTHER; note = 2'-O-methyladenosine-3'-phosphorothioate
  modified_base 23: mod_base = OTHER; note = 2'-O-methylguanosine
tattgaaatataagactactcag

SEQ ID NO: 12954 - RNA, 23 nt, synthetic construct
  source 1..23: mol_type = other RNA
  modified_base 1: mod_base = OTHER; note = 2'-O-methyluridine-3'-phosphorothioate 5'-(E)-Vinylphosphonate
  modified_base 2: mod_base = OTHER; note = 2'-deoxy-2'-fluorouridine-3'-phosphorothioate
  modified_base 3: mod_base = OTHER; note = 2'-O-methyladenosine-3'-phosphate
  modified_base 4: mod_base = OTHER; note = 2'-O-methyladenosine-3'-phosphate
  modified_base 5: mod_base = OTHER; note = 2'-O-methyluridine-3'-phosphate
  modified_base 6: mod_base = OTHER; note = 2'-deoxy-2'-fluorocytidine-3'-phosphate
  modified_base 7: mod_base = OTHER; note = 2'-O-methylcytidine-3'-phosphate
  modified_base 8: mod_base = OTHER; note = 2'-O-methyluridine-3'-phosphate
  modified_base 9: mod_base = OTHER; note = 2'-O-methylguanosine-3'-phosphate
  modified_base 10: mod_base = OTHER; note = 2'-O-methyluridine-3'-phosphate
  modified_base 11: mod_base = OTHER; note = 2'-O-methyluridine-3'-phosphate
  modified_base 12: mod_base = OTHER; note = 2'-O-methyladenosine-3'-phosphate
  modified_base 13: mod_base = OTHER; note = 2'-O-methyladenosine-3'-phosphate
  modified_base 14: mod_base = OTHER; note = 2'-deoxy-2'-fluoroguanosine-3'-phosphate
  modified_base 15: mod_base = OTHER; note = 2'-O-methyladenosine-3'-phosphate
  modified_base 16: mod_base = OTHER; note = 2'-deoxy-2'-fluoroguanosine-3'-phosphate
  modified_base 17: mod_base = OTHER; note = 2'-O-methyluridine-3'-phosphate
  modified_base 18: mod_base = OTHER; note = 2'-O-methyladenosine-3'-phosphate
  modified_base 19: mod_base = OTHER; note = 2'-O-methyladenosine-3'-phosphate
  modified_base 20: mod_base = OTHER; note = 2'-O-methyladenosine-3'-phosphate
  modified_base 21: mod_base = OTHER; note = 2'-O-methylguanosine-3'-phosphorothioate
  modified_base 22: mod_base = OTHER; note = 2'-O-methylguanosine-3'-phosphorothioate
  modified_base 23: mod_base = OTHER; note = 2'-O-methyladenosine
ttaatcctgttaagagtaaagga

SEQ ID NO: 12955 - RNA, 23 nt, synthetic construct
  source 1..23: mol_type = other RNA
  modified_base 1: mod_base = OTHER; note = 2'-O-methyluridine-3'-phosphorothioate 5'-(E)-Vinylphosphonate
  modified_base 2: mod_base = OTHER; note = 2'-deoxy-2'-fluorouridine-3'-phosphorothioate
  modified_base 3: mod_base = OTHER; note = 2'-O-methylcytidine-3'-phosphate
  modified_base 4: mod_base = OTHER; note = 2'-O-methylcytidine-3'-phosphate
  modified_base 5: mod_base = OTHER; note = 2'-O-methyluridine-3'-phosphate
  modified_base 6: mod_base = OTHER; note = 2'-deoxy-2'-fluoroguanosine-3'-phosphate
  modified_base 7: mod_base = OTHER; note = 2'-O-methyluridine-3'-phosphate
  modified_base 8: mod_base = OTHER; note = 2'-O-methyluridine-3'-phosphate
  modified_base 9: mod_base = OTHER; note = 2'-O-methyladenosine-3'-phosphate
  modified_base 10: mod_base = OTHER; note = 2'-O-methyladenosine-3'-phosphate
  modified_base 11: mod_base = OTHER; note = 2'-O-methylguanosine-3'-phosphate
  modified_base 12: mod_base = OTHER; note = 2'-O-methyladenosine-3'-phosphate
  modified_base 13: mod_base = OTHER; note = 2'-O-methylguanosine-3'-phosphate
  modified_base 14: mod_base = OTHER; note = 2'-deoxy-2'-fluorouridine-3'-phosphate
  modified_base 15: mod_base = OTHER; note = 2'-O-methyladenosine-3'-phosphate
  modified_base 16: mod_base = OTHER; note = 2'-deoxy-2'-fluoroadenosine-3'-phosphate
  modified_base 17: mod_base = OTHER; note = 2'-O-methyladenosine-3'-phosphate
  modified_base 18: mod_base = OTHER; note = 2'-O-methylguanosine-3'-phosphate
  modified_base 19: mod_base = OTHER; note = 2'-O-methylguanosine-3'-phosphate
  modified_base 20: mod_base = OTHER; note = 2'-O-methyladenosine-3'-phosphate
  modified_base 21: mod_base = OTHER; note = 2'-O-methyladenosine-3'-phosphorothioate
  modified_base 22: mod_base = OTHER; note = 2'-O-methyladenosine-3'-phosphorothioate
  modified_base 23: mod_base = OTHER; note = 2'-O-methyluridine
ttcctgttaagagtaaaggaaat

SEQ ID NO: 12956 - RNA, 23 nt, synthetic construct
  source 1..23: mol_type = other RNA
  modified_base 1: mod_base = OTHER; note = 2'-O-methyluridine-3'-phosphorothioate 5'-(E)-Vinylphosphonate
  modified_base 2: mod_base = OTHER; note = 2'-deoxy-2'-fluoroadenosine-3'-phosphorothioate
  modified_base 3: mod_base = OTHER; note = 2'-O-methyluridine-3'-phosphate
  modified_base 4: mod_base = OTHER; note = 2'-O-methylcytidine-3'-phosphate
  modified_base 5: mod_base = OTHER; note = 2'-O-methylcytidine-3'-phosphate
  modified_base 6: mod_base = OTHER; note = 2'-deoxy-2'-fluorouridine-3'-phosphate
  modified_base 7: mod_base = OTHER; note = 2'-O-methylguanosine-3'-phosphate
  modified_base 8: mod_base = OTHER; note = 2'-O-methyluridine-3'-phosphate
  modified_base 9: mod_base = OTHER; note = 2'-O-methyluridine-3'-phosphate
  modified_base 10: mod_base = OTHER; note = 2'-O-methyladenosine-3'-phosphate
  modified_base 11: mod_base = OTHER; note = 2'-O-methyladenosine-3'-phosphate
  modified_base 12: mod_base = OTHER; note = 2'-O-methylguanosine-3'-phosphate
  modified_base 13: mod_base = OTHER; note = 2'-O-methyladenosine-3'-phosphate
  modified_base 14: mod_base = OTHER; note = 2'-deoxy-2'-fluoroguanosine-3'-phosphate
  modified_base 15: mod_base = OTHER; note = 2'-O-methyluridine-3'-phosphate
  modified_base 16: mod_base = OTHER; note = 2'-deoxy-2'-fluoroadenosine-3'-phosphate
  modified_base 17: mod_base = OTHER; note = 2'-O-methyladenosine-3'-phosphate
  modified_base 18: mod_base = OTHER; note = 2'-O-methyladenosine-3'-phosphate
  modified_base 19: mod_base = OTHER; note = 2'-O-methylguanosine-3'-phosphate
  modified_base 20: mod_base = OTHER; note = 2'-O-methylguanosine-3'-phosphate
  modified_base 21: mod_base = OTHER; note = 2'-O-methyladenosine-3'-phosphorothioate
  modified_base 22: mod_base = OTHER; note = 2'-O-methyladenosine-3'-phosphorothioate
  modified_base 23: mod_base = OTHER; note = 2'-O-methyladenosine
tatcctgttaagagtaaaggaaa

SEQ ID NO: 12957 - RNA, 23 nt, synthetic construct
  source 1..23: mol_type = other RNA
  modified_base 1: mod_base = OTHER; note = 2'-O-methyluridine-3'-phosphorothioate 5'-(E)-Vinylphosphonate
  modified_base 2: mod_base = OTHER; note = 2'-deoxy-2'-fluoroadenosine-3'-phosphorothioate
  modified_base 3: mod_base = OTHER; note = 2'-O-methyladenosine-3'-phosphate
  modified_base 4: mod_base = OTHER; note = 2'-O-methyluridine-3'-phosphate
  modified_base 5: mod_base = OTHER; note = 2'-O-methylcytidine-3'-phosphate
  modified_base 6: mod_base = OTHER; note = 2'-deoxy-2'-fluorocytidine-3'-phosphate
  modified_base 7: mod_base = OTHER; note = 2'-O-methyluridine-3'-phosphate
  modified_base 8: mod_base = OTHER; note = 2'-O-methylguanosine-3'-phosphate
  modified_base 9: mod_base = OTHER; note = 2'-O-methyluridine-3'-phosphate
  modified_base 10: mod_base = OTHER; note = 2'-O-methyluridine-3'-phosphate
  modified_base 11: mod_base = OTHER; note = 2'-O-methyladenosine-3'-phosphate
  modified_base 12: mod_base = OTHER; note = 2'-O-methyladenosine-3'-phosphate
  modified_base 13: mod_base = OTHER; note = 2'-O-methylguanosine-3'-phosphate
  modified_base 14: mod_base = OTHER; note = 2'-deoxy-2'-fluoroadenosine-3'-phosphate
  modified_base 15: mod_base = OTHER; note = 2'-O-methylguanosine-3'-phosphate
  modified_base 16: mod_base = OTHER; note = 2'-deoxy-2'-fluorouridine-3'-phosphate
  modified_base 17: mod_base = OTHER; note = 2'-O-methyladenosine-3'-phosphate
  modified_base 18: mod_base = OTHER; note = 2'-O-methyladenosine-3'-phosphate
  modified_base 19: mod_base = OTHER; note = 2'-O-methyladenosine-3'-phosphate
  modified_base 20: mod_base = OTHER; note = 2'-O-methylguanosine-3'-phosphate
  modified_base 21: mod_base = OTHER; note = 2'-O-methylguanosine-3'-phosphorothioate
  modified_base 22: mod_base = OTHER; note = 2'-O-methyladenosine-3'-phosphorothioate
  modified_base 23: mod_base = OTHER; note = 2'-O-methyladenosine
taatcctgttaagagtaaaggaa

SEQ ID NO: 12958 - RNA, 23 nt, synthetic construct
  source 1..23: mol_type = other RNA
  modified_base 1: mod_base = OTHER; note = 2'-O-methyluridine-3'-phosphorothioate 5'-(E)-Vinylphosphonate
  modified_base 2: mod_base = OTHER; note = 2'-deoxy-2'-fluoroadenosine-3'-phosphorothioate
  modified_base 3: mod_base = OTHER; note = 2'-O-methyluridine-3'-phosphate
  modified_base 4: mod_base = OTHER; note = 2'-O-methyladenosine-3'-phosphate
  modified_base 5: mod_base = OTHER; note = 2'-O-methyladenosine-3'-phosphate
  modified_base 6: mod_base = OTHER; note = 2'-deoxy-2'-fluorouridine-3'-phosphate
  modified_base 7: mod_base = OTHER; note = 2'-O-methylcytidine-3'-phosphate
  modified_base 8: mod_base = OTHER; note = 2'-O-methylcytidine-3'-phosphate
  modified_base 9: mod_base = OTHER; note = 2'-O-methyluridine-3'-phosphate
  modified_base 10: mod_base = OTHER; note = 2'-O-methylguanosine-3'-phosphate
  modified_base 11: mod_base = OTHER; note = 2'-O-methyluridine-3'-phosphate
  modified_base 12: mod_base = OTHER; note = 2'-O-methyluridine-3'-phosphate
  modified_base 13: mod_base = OTHER; note = 2'-O-methyladenosine-3'-phosphate
  modified_base 14: mod_base = OTHER; note = 2'-deoxy-2'-fluoroadenosine-3'-phosphate
  modified_base 15: mod_base = OTHER; note = 2'-O-methylguanosine-3'-phosphate
  modified_base 16: mod_base = OTHER; note = 2'-deoxy-2'-fluoroadenosine-3'-phosphate
  modified_base 17: mod_base = OTHER; note = 2'-O-methylguanosine-3'-phosphate
  modified_base 18: mod_base = OTHER; note = 2'-O-methyluridine-3'-phosphate
  modified_base 19: mod_base = OTHER; note = 2'-O-methyladenosine-3'-phosphate
  modified_base 20: mod_base = OTHER; note = 2'-O-methyladenosine-3'-phosphate
  modified_base 21: mod_base = OTHER; note = 2'-O-methyladenosine-3'-phosphorothioate
  modified_base 22: mod_base = OTHER; note = 2'-O-methylguanosine-3'-phosphorothioate
  modified_base 23: mod_base = OTHER; note = 2'-O-methylguanosine
tataatcctgttaagagtaaagg

SEQ ID NO: 12959 - RNA, 23 nt, synthetic construct
  source 1..23: mol_type = other RNA
  modified_base 1: mod_base = OTHER; note = 2'-O-methyluridine-3'-phosphorothioate 5'-(E)-Vinylphosphonate
  modified_base 2: mod_base = OTHER; note = 2'-deoxy-2'-fluorouridine-3'-phosphorothioate
  modified_base 3: mod_base = OTHER; note = 2'-O-methyladenosine-3'-phosphate
  modified_base 4: mod_base = OTHER; note = 2'-O-methyluridine-3'-phosphate
  modified_base 5: mod_base = OTHER; note = 2'-O-methyladenosine-3'-phosphate
  modified_base 6: mod_base = OTHER; note = 2'-deoxy-2'-fluoroadenosine-3'-phosphate
  modified_base 7: mod_base = OTHER; note = 2'-O-methyluridine-3'-phosphate
  modified_base 8: mod_base = OTHER; note = 2'-O-methylcytidine-3'-phosphate
  modified_base 9: mod_base = OTHER; note = 2'-O-methylcytidine-3'-phosphate
  modified_base 10: mod_base = OTHER; note = 2'-O-methyluridine-3'-phosphate
  modified_base 11: mod_base = OTHER; note = 2'-O-methylguanosine-3'-phosphate
  modified_base 12: mod_base = OTHER; note = 2'-O-methyluridine-3'-phosphate
  modified_base 13: mod_base = OTHER; note = 2'-O-methyluridine-3'-phosphate
  modified_base 14: mod_base = OTHER; note = 2'-deoxy-2'-fluoroadenosine-3'-phosphate
  modified_base 15: mod_base = OTHER; note = 2'-O-methyladenosine-3'-phosphate
  modified_base 16: mod_base = OTHER; note = 2'-deoxy-2'-fluoroguanosine-3'-phosphate
  modified_base 17: mod_base = OTHER; note = 2'-O-methyladenosine-3'-phosphate
  modified_base 18: mod_base = OTHER; note = 2'-O-methylguanosine-3'-phosphate
  modified_base 19: mod_base = OTHER; note = 2'-O-methyluridine-3'-phosphate
  modified_base 20: mod_base = OTHER; note = 2'-O-methyladenosine-3'-phosphate
  modified_base 21: mod_base = OTHER; note = 2'-O-methyladenosine-3'-phosphorothioate
  modified_base 22: mod_base = OTHER; note = 2'-O-methyladenosine-3'-phosphorothioate
  modified_base 23: mod_base = OTHER; note = 2'-O-methylguanosine
ttataatcctgttaagagtaaag

SEQ ID NO: 12960 - RNA, 23 nt, synthetic construct
  source 1..23: mol_type = other RNA
  modified_base 1: mod_base = OTHER; note = 2'-O-methyluridine-3'-phosphorothioate 5'-(E)-Vinylphosphonate
  modified_base 2: mod_base = OTHER; note = 2'-deoxy-2'-fluorocytidine-3'-phosphorothioate
  modified_base 3: mod_base = OTHER; note = 2'-O-methyluridine-3'-phosphate
  modified_base 4: mod_base = OTHER; note = 2'-O-methyladenosine-3'-phosphate
  modified_base 5: mod_base = OTHER; note = 2'-O-methyluridine-3'-phosphate
  modified_base 6: mod_base = OTHER; note = 2'-deoxy-2'-fluoroadenosine-3'-phosphate
  modified_base 7: mod_base = OTHER; note = 2'-O-methyluridine-3'-phosphate
  modified_base 8: mod_base = OTHER; note = 2'-O-methyladenosine-3'-phosphate
  modified_base 9: mod_base = OTHER; note = 2'-O-methyluridine-3'-phosphate
  modified_base 10: mod_base = OTHER; note = 2'-O-methyladenosine-3'-phosphate
  modified_base 11: mod_base = OTHER; note = 2'-O-methyladenosine-3'-phosphate
  modified_base 12: mod_base = OTHER; note = 2'-O-methyluridine-3'-phosphate
  modified_base 13: mod_base = OTHER; note = 2'-O-methylcytidine-3'-phosphate
  modified_base 14: mod_base = OTHER; note = 2'-deoxy-2'-fluorocytidine-3'-phosphate
  modified_base 15: mod_base = OTHER; note = 2'-O-methyluridine-3'-phosphate
  modified_base 16: mod_base = OTHER; note = 2'-deoxy-2'-fluoroguanosine-3'-phosphate
  modified_base 17: mod_base = OTHER; note = 2'-O-methyluridine-3'-phosphate
  modified_base 18: mod_base = OTHER; note = 2'-O-methyluridine-3'-phosphate
  modified_base 19: mod_base = OTHER; note = 2'-O-methyladenosine-3'-phosphate
  modified_base 20: mod_base = OTHER; note = 2'-O-methyladenosine-3'-phosphate
  modified_base 21: mod_base = OTHER; note = 2'-O-methylguanosine-3'-phosphorothioate
  modified_base 22: mod_base = OTHER; note = 2'-O-methyladenosine-3'-phosphorothioate
  modified_base 23: mod_base = OTHER; note = 2'-O-methylguanosine
tctatatataatcctgttaagag

SEQ ID NO: 12961 - RNA, 23 nt, synthetic construct
  source 1..23: mol_type = other RNA
  modified_base 1: mod_base = OTHER; note = 2'-O-methyluridine-3'-phosphorothioate 5'-(E)-Vinylphosphonate
  modified_base 2: mod_base = OTHER; note = 2'-deoxy-2'-fluorocytidine-3'-phosphorothioate
  modified_base 3: mod_base = OTHER; note = 2'-O-methyladenosine-3'-phosphate
  modified_base 4: mod_base = OTHER; note = 2'-O-methyluridine-3'-phosphate
  modified_base 5: mod_base = OTHER; note = 2'-O-methylguanosine-3'-phosphate
  modified_base 6: mod_base = OTHER; note = 2'-deoxy-2'-fluorouridine-3'-phosphate
  modified_base 7: mod_base = OTHER; note = 2'-O-methyluridine-3'-phosphate
  modified_base 8: mod_base = OTHER; note = 2'-O-methylcytidine-3'-phosphate
  modified_base 9: mod_base = OTHER; note = 2'-O-methyluridine-3'-phosphate
  modified_base 10: mod_base = OTHER; note = 2'-O-methyladenosine-3'-phosphate
  modified_base 11: mod_base = OTHER; note = 2'-O-methyluridine-3'-phosphate
  modified_base 12: mod_base = OTHER; note = 2'-O-methyladenosine-3'-phosphate
  modified_base 13: mod_base = OTHER; note = 2'-O-methyluridine-3'-phosphate
  modified_base 14: mod_base = OTHER; note = 2'-deoxy-2'-fluoroadenosine-3'-phosphate
  modified_base 15: mod_base = OTHER; note = 2'-O-methyluridine-3'-phosphate
  modified_base 16: mod_base = OTHER; note = 2'-deoxy-2'-fluoroadenosine-3'-phosphate
  modified_base 17: mod_base = OTHER; note = 2'-O-methyladenosine-3'-phosphate
  modified_base 18: mod_base = OTHER; note = 2'-O-methyluridine-3'-phosphate
  modified_base 19: mod_base = OTHER; note = 2'-O-methylcytidine-3'-phosphate
  modified_base 20: mod_base = OTHER; note = 2'-O-methylcytidine-3'-phosphate
  modified_base 21: mod_base = OTHER; note = 2'-O-methyluridine-3'-phosphorothioate
  modified_base 22: mod_base = OTHER; note = 2'-O-methylguanosine-3'-phosphorothioate
  modified_base 23: mod_base = OTHER; note = 2'-O-methyluridine
tcatgttctatatataatcctgt

SEQ ID NO: 12962 - RNA, 23 nt, synthetic construct
  source 1..23: mol_type = other RNA
  modified_base 1: mod_base = OTHER; note = 2'-O-methyluridine-3'-phosphorothioate 5'-(E)-Vinylphosphonate
  modified_base 2: mod_base = OTHER; note = 2'-deoxy-2'-fluorouridine-3'-phosphorothioate
  modified_base 3: mod_base = OTHER; note = 2'-O-methyladenosine-3'-phosphate
  modified_base 4: mod_base = OTHER; note = 2'-O-methyluridine-3'-phosphate
  modified_base 5: mod_base = OTHER; note = 2'-O-methyluridine-3'-phosphate
  modified_base 6: mod_base = OTHER; note = 2'-deoxy-2'-fluorouridine-3'-phosphate
  modified_base 7: mod_base = OTHER; note = 2'-O-methyluridine-3'-phosphate
  modified_base 8: mod_base = OTHER; note = 2'-O-methyluridine-3'-phosphate
  modified_base 9: mod_base = OTHER; note = 2'-O-methylguanosine-3'-phosphate
  modified_base 10: mod_base = OTHER; note = 2'-O-methyluridine-3'-phosphate
  modified_base 11: mod_base = OTHER; note = 2'-O-methyladenosine-3'-phosphate
  modified_base 12: mod_base = OTHER; note = 2'-O-methyladenosine-3'-phosphate
  modified_base 13: mod_base = OTHER; note = 2'-O-methylguanosine-3'-phosphate
  modified_base 14: mod_base = OTHER; note = 2'-deoxy-2'-fluorouridine-3'-phosphate
  modified_base 15: mod_base = OTHER; note = 2'-O-methylguanosine-3'-phosphate
  modified_base 16: mod_base = OTHER; note = 2'-deoxy-2'-fluoroadenosine-3'-phosphate
  modified_base 17: mod_base = OTHER; note = 2'-O-methylguanosine-3'-phosphate
  modified_base 18: mod_base = OTHER; note = 2'-O-methylcytidine-3'-phosphate
  modified_base 19: mod_base = OTHER; note = 2'-O-methyladenosine-3'-phosphate
  modified_base 20: mod_base = OTHER; note = 2'-O-methyluridine-3'-phosphate
  modified_base 21: mod_base = OTHER; note = 2'-O-methylguanosine-3'-phosphorothioate
  modified_base 22: mod_base = OTHER; note = 2'-O-methyluridine-3'-phosphorothioate
  modified_base 23: mod_base = OTHER; note = 2'-O-methyluridine
ttatttttgtaagtgagcatgtt

SEQ ID NO: 12963 - RNA, 23 nt, synthetic construct
  source 1..23: mol_type = other RNA
  modified_base 1: mod_base = OTHER; note = 2'-O-methyluridine-3'-phosphorothioate 5'-(E)-Vinylphosphonate
  modified_base 2: mod_base = OTHER; note = 2'-deoxy-2'-fluoroadenosine-3'-phosphorothioate
  modified_base 3: mod_base = OTHER; note = 2'-O-methyluridine-3'-phosphate
  modified_base 4: mod_base = OTHER; note = 2'-O-methylcytidine-3'-phosphate
  modified_base 5: mod_base = OTHER; note = 2'-O-methyladenosine-3'-phosphate
  modified_base 6: mod_base = OTHER; note = 2'-deoxy-2'-fluorouridine-3'-phosphate
  modified_base 7: mod_base = OTHER; note = 2'-O-methylcytidine-3'-phosphate
  modified_base 8: mod_base = OTHER; note = 2'-O-methylcytidine-3'-phosphate
  modified_base 9: mod_base = OTHER; note = 2'-O-methyluridine-3'-phosphate
  modified_base 10: mod_base = OTHER; note = 2'-O-methyladenosine-3'-phosphate
  modified_base 11: mod_base = OTHER; note = 2'-O-methyluridine-3'-phosphate
  modified_base 12: mod_base = OTHER; note = 2'-O-methyluridine-3'-phosphate
  modified_base 13: mod_base = OTHER; note = 2'-O-methyluridine-3'-phosphate
  modified_base 14: mod_base = OTHER; note = 2'-deoxy-2'-fluorouridine-3'-phosphate
  modified_base 15: mod_base = OTHER; note = 2'-O-methyluridine-3'-phosphate
  modified_base 16: mod_base = OTHER; note = 2'-deoxy-2'-fluoroguanosine-3'-phosphate
  modified_base 17: mod_base = OTHER; note = 2'-O-methyluridine-3'-phosphate
  modified_base 18: mod_base = OTHER; note = 2'-O-methyladenosine-3'-phosphate
  modified_base 19: mod_base = OTHER; note = 2'-O-methyladenosine-3'-phosphate
  modified_base 20: mod_base = OTHER; note = 2'-O-methylguanosine-3'-phosphate
  modified_base 21: mod_base = OTHER; note = 2'-O-methyluridine-3'-phosphorothioate
  modified_base 22: mod_base = OTHER; note = 2'-O-methylguanosine-3'-phosphorothioate
  modified_base 23: mod_base = OTHER; note = 2'-O-methyladenosine
tatcatcctatttttgtaagtga

SEQ ID NO: 12964 - RNA, 23 nt, synthetic construct
  source 1..23: mol_type = other RNA
  modified_base 1: mod_base = OTHER; note = 2'-O-methyluridine-3'-phosphorothioate 5'-(E)-Vinylphosphonate
  modified_base 2: mod_base = OTHER; note = 2'-deoxy-2'-fluoroadenosine-3'-phosphorothioate
  modified_base 3: mod_base = OTHER; note = 2'-O-methyluridine-3'-phosphate
  modified_base 4: mod_base = OTHER; note = 2'-O-methyladenosine-3'-phosphate
  modified_base 5: mod_base = OTHER; note = 2'-O-methylcytidine-3'-phosphate
  modified_base 6: mod_base = OTHER; note = 2'-deoxy-2'-fluoroadenosine-3'-phosphate
  modified_base 7: mod_base = OTHER; note = 2'-O-methyladenosine-3'-phosphate
  modified_base 8: mod_base = OTHER; note = 2'-O-methylguanosine-3'-phosphate
  modified_base 9: mod_base = OTHER; note = 2'-O-methyladenosine-3'-phosphate
  modified_base 10: mod_base = OTHER; note = 2'-O-methyladenosine-3'-phosphate
  modified_base 11: mod_base = OTHER; note = 2'-O-methylguanosine-3'-phosphate
  modified_base 12: mod_base = OTHER; note = 2'-O-methylcytidine-3'-phosphate
  modified_base 13: mod_base = OTHER; note = 2'-O-methylcytidine-3'-phosphate
  modified_base 14: mod_base = OTHER; note = 2'-deoxy-2'-fluorouridine-3'-phosphate
  modified_base 15: mod_base = OTHER; note = 2'-O-methylguanosine-3'-phosphate
  modified_base 16: mod_base = OTHER; note = 2'-deoxy-2'-fluorocytidine-3'-phosphate
  modified_base 17: mod_base = OTHER; note = 2'-O-methylcytidine-3'-phosphate
  modified_base 18: mod_base = OTHER; note = 2'-O-methyluridine-3'-phosphate
  modified_base 19: mod_base = OTHER; note = 2'-O-methyluridine-3'-phosphate
  modified_base 20: mod_base = OTHER; note = 2'-O-methyladenosine-3'-phosphate
  modified_base 21: mod_base = OTHER; note = 2'-O-methyluridine-3'-phosphorothioate
  modified_base 22: mod_base = OTHER; note = 2'-O-methylguanosine-3'-phosphorothioate
  modified_base 23: mod_base = OTHER; note = 2'-O-methylcytidine
tatacaagaagcctgccttatgc

SEQ ID NO: 12965 - RNA, 23 nt, synthetic construct
  source 1..23: mol_type = other RNA
  modified_base 1: mod_base = OTHER; note = 2'-O-methyluridine-3'-phosphorothioate 5'-(E)-Vinylphosphonate
  modified_base 2: mod_base = OTHER; note = 2'-deoxy-2'-fluoroadenosine-3'-phosphorothioate
  modified_base 3: mod_base = OTHER; note = 2'-O-methyladenosine-3'-phosphate
  modified_base 4: mod_base = OTHER; note = 2'-O-methylguanosine-3'-phosphate
  modified_base 5: mod_base = OTHER; note = 2'-O-methyluridine-3'-phosphate
  modified_base 6: mod_base = OTHER; note = 2'-deoxy-2'-fluoroadenosine-3'-phosphate
  modified_base 7: mod_base = OTHER; note = 2'-O-methyluridine-3'-phosphate
  modified_base 8: mod_base = OTHER; note = 2'-O-methyladenosine-3'-phosphate
  modified_base 9: mod_base = OTHER; note = 2'-O-methyluridine-3'-phosphate
  modified_base 10: mod_base = OTHER; note = 2'-O-methyladenosine-3'-phosphate
  modified_base 11: mod_base = OTHER; note = 2'-O-methylcytidine-3'-phosphate
  modified_base 12: mod_base = OTHER; note = 2'-O-methyladenosine-3'-phosphate
  modified_base 13: mod_base = OTHER; note = 2'-O-methyladenosine-3'-phosphate
  modified_base 14: mod_base = OTHER; note = 2'-deoxy-2'-fluoroguanosine-3'-phosphate
  modified_base 15: mod_base = OTHER; note = 2'-O-methyladenosine-3'-phosphate
  modified_base 16: mod_base = OTHER; note = 2'-deoxy-2'-fluoroadenosine-3'-phosphate
  modified_base 17: mod_base = OTHER; note = 2'-O-methylguanosine-3'-phosphate
  modified_base 18: mod_base = OTHER; note = 2'-O-methylcytidine-3'-phosphate
  modified_base 19: mod_base = OTHER; note = 2'-O-methylcytidine-3'-phosphate
  modified_base 20: mod_base = OTHER; note = 2'-O-methyluridine-3'-phosphate
  modified_base 21: mod_base = OTHER; note = 2'-O-methylguanosine-3'-phosphorothioate
  modified_base 22: mod_base = OTHER; note = 2'-O-methylcytidine-3'-phosphorothioate
  modified_base 23: mod_base = OTHER; note = 2'-O-methylcytidine
taagtatatacaagaagcctgcc

SEQ ID NO: 12966 - RNA, 23 nt, synthetic construct
  source 1..23: mol_type = other RNA
  modified_base 1: mod_base = OTHER; note = 2'-O-methyluridine-3'-phosphorothioate 5'-(E)-Vinylphosphonate
  modified_base 2: mod_base = OTHER; note = 2'-deoxy-2'-fluorouridine-3'-phosphorothioate
  modified_base 3: mod_base = OTHER; note = 2'-O-methyluridine-3'-phosphate
  modified_base 4: mod_base = OTHER; note = 2'-O-methyluridine-3'-phosphate
  modified_base 5: mod_base = OTHER; note = 2'-O-methylguanosine-3'-phosphate
  modified_base 6: mod_base = OTHER; note = 2'-deoxy-2'-fluoroadenosine-3'-phosphate
  modified_base 7: mod_base = OTHER; note = 2'-O-methylcytidine-3'-phosphate
  modified_base 8: mod_base = OTHER; note = 2'-O-methyladenosine-3'-phosphate
  modified_base 9: mod_base = OTHER; note = 2'-O-methylguanosine-3'-phosphate
  modified_base 10: mod_base = OTHER; note = 2'-O-methylcytidine-3'-phosphate
  modified_base 11: mod_base = OTHER; note = 2'-O-methyladenosine-3'-phosphate
  modified_base 12: mod_base = OTHER; note = 2'-O-methyluridine-3'-phosphate
  modified_base 13: mod_base = OTHER; note = 2'-O-methyladenosine-3'-phosphate
  modified_base 14: mod_base = OTHER; note = 2'-deoxy-2'-fluoroadenosine-3'-phosphate
  modified_base 15: mod_base = OTHER; note = 2'-O-methylguanosine-3'-phosphate
  modified_base 16: mod_base = OTHER; note = 2'-deoxy-2'-fluorouridine-3'-phosphate
  modified_base 17: mod_base = OTHER; note = 2'-O-methyladenosine-3'-phosphate
  modified_base 18: mod_base = OTHER; note = 2'-O-methyluridine-3'-phosphate
  modified_base 19: mod_base = OTHER; note = 2'-O-methyladenosine-3'-phosphate
  modified_base 20: mod_base = OTHER; note = 2'-O-methyluridine-3'-phosphate
  modified_base 21: mod_base = OTHER; note = 2'-O-methyladenosine-3'-phosphorothioate
  modified_base 22: mod_base = OTHER; note = 2'-O-methylcytidine-3'-phosphorothioate
  modified_base 23: mod_base = OTHER; note = 2'-O-methyladenosine
ttttgacagcataagtatataca

SEQ ID NO: 12967 - RNA, 23 nt, synthetic construct
  source 1..23: mol_type = other RNA
  modified_base 1: mod_base = OTHER; note = 2'-O-methyluridine-3'-phosphorothioate 5'-(E)-Vinylphosphonate
  modified_base 2: mod_base = OTHER; note = 2'-deoxy-2'-fluoroadenosine-3'-phosphorothioate
  modified_base 3: mod_base = OTHER; note = 2'-O-methyluridine-3'-phosphate
  modified_base 4: mod_base = OTHER; note = 2'-O-methyluridine-3'-phosphate
  modified_base 5: mod_base = OTHER; note = 2'-O-methyluridine-3'-phosphate
  modified_base 6: mod_base = OTHER; note = 2'-deoxy-2'-fluoroguanosine-3'-phosphate
  modified_base 7: mod_base = OTHER; note = 2'-O-methyladenosine-3'-phosphate
  modified_base 8: mod_base = OTHER; note = 2'-O-methylcytidine-3'-phosphate
  modified_base 9: mod_base = OTHER; note = 2'-O-methyladenosine-3'-phosphate
  modified_base 10: mod_base = OTHER; note = 2'-O-methylguanosine-3'-phosphate
  modified_base 11: mod_base = OTHER; note = 2'-O-methylcytidine-3'-phosphate
  modified_base 12: mod_base = OTHER; note = 2'-O-methyladenosine-3'-phosphate
  modified_base 13: mod_base = OTHER; note = 2'-O-methyluridine-3'-phosphate
  modified_base 14: mod_base = OTHER; note = 2'-deoxy-2'-fluoroadenosine-3'-phosphate
  modified_base 15: mod_base = OTHER; note = 2'-O-methyladenosine-3'-phosphate
  modified_base 16: mod_base = OTHER; note = 2'-deoxy-2'-fluoroguanosine-3'-phosphate
  modified_base 17: mod_base = OTHER; note = 2'-O-methyluridine-3'-phosphate
  modified_base 18: mod_base = OTHER; note = 2'-O-methyladenosine-3'-phosphate
  modified_base 19: mod_base = OTHER; note = 2'-O-methyluridine-3'-phosphate
  modified_base 20: mod_base = OTHER; note = 2'-O-methyladenosine-3'-phosphate
  modified_base 21: mod_base = OTHER; note = 2'-O-methyluridine-3'-phosphorothioate
  modified_base 22: mod_base = OTHER; note = 2'-O-methyladenosine-3'-phosphorothioate
  modified_base 23: mod_base = OTHER; note = 2'-O-methylcytidine
tatttgacagcataagtatatac

SEQ ID NO: 12968 - RNA, 23 nt, synthetic construct
  source 1..23: mol_type = other RNA
  modified_base 1: mod_base = OTHER; note = 2'-O-methyluridine-3'-phosphorothioate 5'-(E)-Vinylphosphonate
  modified_base 2: mod_base = OTHER; note = 2'-deoxy-2'-fluorocytidine-3'-phosphorothioate
  modified_base 3: mod_base = OTHER; note = 2'-O-methyladenosine-3'-phosphate
  modified_base 4: mod_base = OTHER; note = 2'-O-methyluridine-3'-phosphate
  modified_base 5: mod_base = OTHER; note = 2'-O-methyluridine-3'-phosphate
  modified_base 6: mod_base = OTHER; note = 2'-deoxy-2'-fluorouridine-3'-phosphate
  modified_base 7: mod_base = OTHER; note = 2'-O-methylguanosine-3'-phosphate
  modified_base 8: mod_base = OTHER; note = 2'-O-methyladenosine-3'-phosphate
  modified_base 9: mod_base = OTHER; note = 2'-O-methylcytidine-3'-phosphate
  modified_base 10: mod_base = OTHER; note = 2'-O-methyladenosine-3'-phosphate
  modified_base 11: mod_base = OTHER; note = 2'-O-methylguanosine-3'-phosphate
  modified_base 12: mod_base = OTHER; note = 2'-O-methylcytidine-3'-phosphate
  modified_base 13: mod_base = OTHER; note = 2'-O-methyladenosine-3'-phosphate
  modified_base 14: mod_base = OTHER; note = 2'-deoxy-2'-fluorouridine-3'-phosphate
  modified_base 15: mod_base = OTHER; note = 2'-O-methyladenosine-3'-phosphate
  modified_base 16: mod_base = OTHER; note = 2'-deoxy-2'-fluoroadenosine-3'-phosphate
  modified_base 17: mod_base = OTHER; note = 2'-O-methylguanosine-3'-phosphate
  modified_base 18: mod_base = OTHER; note = 2'-O-methyluridine-3'-phosphate
  modified_base 19: mod_base = OTHER; note = 2'-O-methyladenosine-3'-phosphate
  modified_base 20: mod_base = OTHER; note = 2'-O-methyluridine-3'-phosphate
  modified_base 21: mod_base = OTHER; note = 2'-O-methyladenosine-3'-phosphorothioate
  modified_base 22: mod_base = OTHER; note = 2'-O-methyluridine-3'-phosphorothioate
  modified_base 23: mod_base = OTHER; note = 2'-O-methyladenosine
tcatttgacagcataagtatata

SEQ ID NO: 12969 - RNA, 23 nt, synthetic construct
  source 1..23: mol_type = other RNA
  modified_base 1: mod_base = OTHER; note = 2'-O-methyluridine-3'-phosphorothioate 5'-(E)-Vinylphosphonate
  modified_base 2: mod_base = OTHER; note = 2'-deoxy-2'-fluoroadenosine-3'-phosphorothioate
  modified_base 3: mod_base = OTHER; note = 2'-O-methylcytidine-3'-phosphate
  modified_base 4: mod_base = OTHER; note = 2'-O-methyladenosine-3'-phosphate
  modified_base 5: mod_base = OTHER; note = 2'-O-methyluridine-3'-phosphate
  modified_base 6: mod_base = OTHER; note = 2'-deoxy-2'-fluorouridine-3'-phosphate
  modified_base 7: mod_base = OTHER; note = 2'-O-methyluridine-3'-phosphate
  modified_base 8: mod_base = OTHER; note = 2'-O-methylguanosine-3'-phosphate
  modified_base 9: mod_base = OTHER; note = 2'-O-methyladenosine-3'-phosphate
  modified_base 10: mod_base = OTHER; note = 2'-O-methylcytidine-3'-phosphate
  modified_base 11: mod_base = OTHER; note = 2'-O-methyladenosine-3'-phosphate
  modified_base 12: mod_base = OTHER; note = 2'-O-methylguanosine-3'-phosphate
  modified_base 13: mod_base = OTHER; note = 2'-O-methylcytidine-3'-phosphate
  modified_base 14: mod_base = OTHER; note = 2'-deoxy-2'-fluoroadenosine-3'-phosphate
  modified_base 15: mod_base = OTHER; note = 2'-O-methyluridine-3'-phosphate
  modified_base 16: mod_base = OTHER; note = 2'-deoxy-2'-fluoroadenosine-3'-phosphate
  modified_base 17: mod_base = OTHER; note = 2'-O-methyladenosine-3'-phosphate
  modified_base 18: mod_base = OTHER; note = 2'-O-methylguanosine-3'-phosphate
  modified_base 19: mod_base = OTHER; note = 2'-O-methyluridine-3'-phosphate
  modified_base 20: mod_base = OTHER; note = 2'-O-methyladenosine-3'-phosphate
  modified_base 21: mod_base = OTHER; note = 2'-O-methyluridine-3'-phosphorothioate
  modified_base 22: mod_base = OTHER; note = 2'-O-methyladenosine-3'-phosphorothioate
  modified_base 23: mod_base = OTHER; note = 2'-O-methyluridine
tacatttgacagcataagtatat

SEQ ID NO: 12970 - RNA, 23 nt, synthetic construct
  source 1..23: mol_type = other RNA
  modified_base 1: mod_base = OTHER; note = 2'-O-methyluridine-3'-phosphorothioate 5'-(E)-Vinylphosphonate
  modified_base 2: mod_base = OTHER; note = 2'-deoxy-2'-fluoroadenosine-3'-phosphorothioate
  modified_base 3: mod_base = OTHER; note = 2'-O-methyladenosine-3'-phosphate
  modified_base 4: mod_base = OTHER; note = 2'-O-methylcytidine-3'-phosphate
  modified_base 5: mod_base = OTHER; note = 2'-O-methyladenosine-3'-phosphate
  modified_base 6: mod_base = OTHER; note = 2'-deoxy-2'-fluorouridine-3'-phosphate
  modified_base 7: mod_base = OTHER; note = 2'-O-methyluridine-3'-phosphate
  modified_base 8: mod_base = OTHER; note = 2'-O-methyluridine-3'-phosphate
  modified_base 9: mod_base = OTHER; note = 2'-O-methylguanosine-3'-phosphate
  modified_base 10: mod_base = OTHER; note = 2'-O-methyladenosine-3'-phosphate
  modified_base 11: mod_base = OTHER; note = 2'-O-methylcytidine-3'-phosphate
  modified_base 12: mod_base = OTHER; note = 2'-O-methyladenosine-3'-phosphate
  modified_base 13: mod_base = OTHER; note = 2'-O-methylguanosine-3'-phosphate
  modified_base 14: mod_base = OTHER; note = 2'-deoxy-2'-fluorocytidine-3'-phosphate
  modified_base 15: mod_base = OTHER; note = 2'-O-methyladenosine-3'-phosphate
  modified_base 16: mod_base = OTHER; note = 2'-deoxy-2'-fluorouridine-3'-phosphate
  modified_base 17: mod_base = OTHER; note = 2'-O-methyladenosine-3'-phosphate
  modified_base 18: mod_base = OTHER; note = 2'-O-methyladenosine-3'-phosphate
  modified_base 19: mod_base = OTHER; note = 2'-O-methylguanosine-3'-phosphate
  modified_base 20: mod_base = OTHER; note = 2'-O-methyluridine-3'-phosphate
  modified_base 21: mod_base = OTHER; note = 2'-O-methyladenosine-3'-phosphorothioate
  modified_base 22: mod_base = OTHER; note = 2'-O-methyluridine-3'-phosphorothioate
  modified_base 23: mod_base = OTHER; note = 2'-O-methyladenosine
taacatttgacagcataagtata

SEQ ID NO: 12971 - RNA, 23 nt, synthetic construct
  source 1..23: mol_type = other RNA
  modified_base 1: mod_base = OTHER; note = 2'-O-methyluridine-3'-phosphorothioate 5'-(E)-Vinylphosphonate
  modified_base 2: mod_base = OTHER; note = 2'-deoxy-2'-fluorouridine-3'-phosphorothioate
  modified_base 3: mod_base = OTHER; note = 2'-O-methyladenosine-3'-phosphate
  modified_base 4: mod_base = OTHER; note = 2'-O-methyladenosine-3'-phosphate
  modified_base 5: mod_base = OTHER; note = 2'-O-methylcytidine-3'-phosphate
  modified_base 6: mod_base = OTHER; note = 2'-deoxy-2'-fluoroadenosine-3'-phosphate
  modified_base 7: mod_base = OTHER; note = 2'-O-methyluridine-3'-phosphate
  modified_base 8: mod_base = OTHER; note = 2'-O-methyluridine-3'-phosphate
  modified_base 9: mod_base = OTHER; note = 2'-O-methyluridine-3'-phosphate
  modified_base 10: mod_base = OTHER; note = 2'-O-methylguanosine-3'-phosphate
  modified_base 11: mod_base = OTHER; note = 2'-O-methyladenosine-3'-phosphate
  modified_base 12: mod_base = OTHER; note = 2'-O-methylcytidine-3'-phosphate
  modified_base 13: mod_base = OTHER; note = 2'-O-methyladenosine-3'-phosphate
  modified_base 14: mod_base = OTHER; note = 2'-deoxy-2'-fluoroguanosine-3'-phosphate
  modified_base 15: mod_base = OTHER; note = 2'-O-methylcytidine-3'-phosphate
  modified_base 16: mod_base = OTHER; note = 2'-deoxy-2'-fluoroadenosine-3'-phosphate
  modified_base 17: mod_base = OTHER; note = 2'-O-methyluridine-3'-phosphate
  modified_base 18: mod_base = OTHER; note = 2'-O-methyladenosine-3'-phosphate
  modified_base 19: mod_base = OTHER; note = 2'-O-methyladenosine-3'-phosphate
  modified_base 20: mod_base = OTHER; note = 2'-O-methylguanosine-3'-phosphate
  modified_base 21: mod_base = OTHER; note = 2'-O-methyluridine-3'-phosphorothioate
  modified_base 22: mod_base = OTHER; note = 2'-O-methyladenosine-3'-phosphorothioate
  modified_base 23: mod_base = OTHER; note = 2'-O-methyluridine
ttaacatttgacagcataagtat

SEQ ID NO: 12972 - RNA, 23 nt, synthetic construct
  source 1..23: mol_type = other RNA
  modified_base 1: mod_base = OTHER; note = 2'-O-methyluridine-3'-phosphorothioate 5'-(E)-Vinylphosphonate
  modified_base 2: mod_base = OTHER; note = 2'-deoxy-2'-fluoroadenosine-3'-phosphorothioate
  modified_base 3: mod_base = OTHER; note = 2'-O-methyluridine-3'-phosphate
  modified_base 4: mod_base = OTHER; note = 2'-O-methyladenosine-3'-phosphate
  modified_base 5: mod_base = OTHER; note = 2'-O-methyladenosine-3'-phosphate
  modified_base 6: mod_base = OTHER; note = 2'-deoxy-2'-fluorocytidine-3'-phosphate
  modified_base 7: mod_base = OTHER; note = 2'-O-methyladenosine-3'-phosphate
  modified_base 8: mod_base = OTHER; note = 2'-O-methyluridine-3'-phosphate
  modified_base 9: mod_base = OTHER; note = 2'-O-methyluridine-3'-phosphate
  modified_base 10: mod_base = OTHER; note = 2'-O-methyluridine-3'-phosphate
  modified_base 11: mod_base = OTHER; note = 2'-O-methylguanosine-3'-phosphate
  modified_base 12: mod_base = OTHER; note = 2'-O-methyladenosine-3'-phosphate
  modified_base 13: mod_base = OTHER; note = 2'-O-methylcytidine-3'-phosphate
  modified_base 14: mod_base = OTHER; note = 2'-deoxy-2'-fluoroadenosine-3'-phosphate
  modified_base 15: mod_base = OTHER; note = 2'-O-methylguanosine-3'-phosphate
  modified_base 16: mod_base = OTHER; note = 2'-deoxy-2'-fluorocytidine-3'-phosphate
  modified_base 17: mod_base = OTHER; note = 2'-O-methyladenosine-3'-phosphate
  modified_base 18: mod_base = OTHER; note = 2'-O-methyluridine-3'-phosphate
  modified_base 19: mod_base = OTHER; note = 2'-O-methyladenosine-3'-phosphate
  modified_base 20: mod_base = OTHER; note = 2'-O-methyladenosine-3'-phosphate
  modified_base 21: mod_base = OTHER; note = 2'-O-methylguanosine-3'-phosphorothioate
  modified_base 22: mod_base = OTHER; note = 2'-O-methyluridine-3'-phosphorothioate
  modified_base 23: mod_base = OTHER; note = 2'-O-methyladenosine
tataacatttgacagcataagta

SEQ ID NO: 12973 - RNA, 23 nt, synthetic construct
  source 1..23: mol_type = other RNA
  modified_base 1: mod_base = OTHER; note = 2'-O-methyluridine-3'-phosphorothioate 5'-(E)-Vinylphosphonate
  modified_base 2: mod_base = OTHER; note = 2'-deoxy-2'-fluoroadenosine-3'-phosphorothioate
  modified_base 3: mod_base = OTHER; note = 2'-O-methylcytidine-3'-phosphate
  modified_base 4: mod_base = OTHER; note = 2'-O-methyladenosine-3'-phosphate
  modified_base 5: mod_base = OTHER; note = 2'-O-methyladenosine-3'-phosphate
  modified_base 6: mod_base = OTHER; note = 2'-deoxy-2'-fluorouridine-3'-phosphate
  modified_base 7: mod_base = OTHER; note = 2'-O-methyladenosine-3'-phosphate
  modified_base 8: mod_base = OTHER; note = 2'-O-methyluridine-3'-phosphate
  modified_base 9: mod_base = OTHER; note = 2'-O-methyladenosine-3'-phosphate
  modified_base 10: mod_base = OTHER; note = 2'-O-methyladenosine-3'-phosphate
  modified_base 11: mod_base = OTHER; note = 2'-O-methylcytidine-3'-phosphate
  modified_base 12: mod_base = OTHER; note = 2'-O-methyladenosine-3'-phosphate
  modified_base 13: mod_base = OTHER; note = 2'-O-methyluridine-3'-phosphate
  modified_base 14: mod_base = OTHER; note = 2'-deoxy-2'-fluorouridine-3'-phosphate
  modified_base 15: mod_base = OTHER; note = 2'-O-methyluridine-3'-phosphate
  modified_base 16: mod_base = OTHER; note = 2'-deoxy-2'-fluoroguanosine-3'-phosphate
  modified_base 17: mod_base = OTHER; note = 2'-O-methyladenosine-3'-phosphate
  modified_base 18: mod_base = OTHER; note = 2'-O-methylcytidine-3'-phosphate
  modified_base 19: mod_base = OTHER; note = 2'-O-methyladenosine-3'-phosphate
  modified_base 20: mod_base = OTHER; note = 2'-O-methylguanosine-3'-phosphate
  modified_base 21: mod_base = OTHER; note = 2'-O-methylcytidine-3'-phosphorothioate
  modified_base 22: mod_base = OTHER; note = 2'-O-methyladenosine-3'-phosphorothioate
  modified_base 23: mod_base = OTHER; note = 2'-O-methyluridine
tacaatataacatttgacagcat

SEQ ID NO: 12974 - RNA, 23 nt, synthetic construct
  source 1..23: mol_type = other RNA
  modified_base 1: mod_base = OTHER; note = 2'-O-methyluridine-3'-phosphorothioate 5'-(E)-Vinylphosphonate
  modified_base 2: mod_base = OTHER; note = 2'-deoxy-2'-fluorouridine-3'-phosphorothioate
  modified_base 3: mod_base = OTHER; note = 2'-O-methyladenosine-3'-phosphate
  modified_base 4: mod_base = OTHER; note = 2'-O-methyluridine-3'-phosphate
  modified_base 5: mod_base = OTHER; note = 2'-O-methyladenosine-3'-phosphate
  modified_base 6: mod_base = OTHER; note = 2'-deoxy-2'-fluoroadenosine-3'-phosphate
  modified_base 7: mod_base = OTHER; note = 2'-O-methylcytidine-3'-phosphate
  modified_base 8: mod_base = OTHER; note = 2'-O-methyladenosine-3'-phosphate
  modified_base 9: mod_base = OTHER; note = 2'-O-methyluridine-3'-phosphate
  modified_base 10: mod_base = OTHER; note = 2'-O-methyluridine-3'-phosphate
  modified_base 11: mod_base = OTHER; note = 2'-O-methyluridine-3'-phosphate
  modified_base 12: mod_base = OTHER; note = 2'-O-methylguanosine-3'-phosphate
  modified_base 13: mod_base = OTHER; note = 2'-O-methyladenosine-3'-phosphate
  modified_base 14: mod_base = OTHER; note = 2'-deoxy-2'-fluorocytidine-3'-phosphate
  modified_base 15: mod_base = OTHER; note = 2'-O-methyladenosine-3'-phosphate
  modified_base 16: mod_base = OTHER; note = 2'-deoxy-2'-fluoroguanosine-3'-phosphate
  modified_base 17: mod_base = OTHER; note = 2'-O-methylcytidine-3'-phosphate
  modified_base 18: mod_base = OTHER; note = 2'-O-methyladenosine-3'-phosphate
  modified_base 19: mod_base = OTHER; note = 2'-O-methyluridine-3'-phosphate
  modified_base 20: mod_base = OTHER; note = 2'-O-methyladenosine-3'-phosphate
  modified_base 21: mod_base = OTHER; note = 2'-O-methyladenosine-3'-phosphorothioate
  modified_base 22: mod_base = OTHER; note = 2'-O-methylguanosine-3'-phosphorothioate
  modified_base 23: mod_base = OTHER; note = 2'-O-methyluridine
ttataacatttgacagcataagt

SEQ ID NO: 12975 - RNA, 23 nt, synthetic construct
  source 1..23: mol_type = other RNA
  modified_base 1: mod_base = OTHER; note = 2'-O-methyluridine-3'-phosphorothioate 5'-(E)-Vinylphosphonate
  modified_base 2: mod_base = OTHER; note = 2'-deoxy-2'-fluoroadenosine-3'-phosphorothioate
  modified_base 3: mod_base = OTHER; note = 2'-O-methyluridine-3'-phosphate
  modified_base 4: mod_base = OTHER; note = 2'-O-methyladenosine-3'-phosphate
  modified_base 5: mod_base = OTHER; note = 2'-O-methyluridine-3'-phosphate
  modified_base 6: mod_base = OTHER; note = 2'-deoxy-2'-fluoroadenosine-3'-phosphate
  modified_base 7: mod_base = OTHER; note = 2'-O-methyladenosine-3'-phosphate
  modified_base 8: mod_base = OTHER; note = 2'-O-methylcytidine-3'-phosphate
  modified_base 9: mod_base = OTHER; note = 2'-O-methyladenosine-3'-phosphate
  modified_base 10: mod_base = OTHER; note = 2'-O-methyluridine-3'-phosphate
  modified_base 11: mod_base = OTHER; note = 2'-O-methyluridine-3'-phosphate
  modified_base 12: mod_base = OTHER; note = 2'-O-methyluridine-3'-phosphate
  modified_base 13: mod_base = OTHER; note = 2'-O-methylguanosine-3'-phosphate
  modified_base 14: mod_base = OTHER; note = 2'-deoxy-2'-fluoroadenosine-3'-phosphate
  modified_base 15: mod_base = OTHER; note = 2'-O-methylcytidine-3'-phosphate
  modified_base 16: mod_base = OTHER; note = 2'-deoxy-2'-fluoroadenosine-3'-phosphate
  modified_base 17: mod_base = OTHER; note = 2'-O-methylguanosine-3'-phosphate
  modified_base 18: mod_base = OTHER; note = 2'-O-methylcytidine-3'-phosphate
  modified_base 19: mod_base = OTHER; note = 2'-O-methyladenosine-3'-phosphate
  modified_base 20: mod_base = OTHER; note = 2'-O-methyluridine-3'-phosphate
  modified_base 21: mod_base = OTHER; note = 2'-O-methyladenosine-3'-phosphorothioate
  modified_base 22: mod_base = OTHER; note = 2'-O-methyladenosine-3'-phosphorothioate
  modified_base 23: mod_base = OTHER; note = 2'-O-methylguanosine
tatataacatttgacagcataag

SEQ ID NO: 12976 - RNA, 23 nt, synthetic construct
  source 1..23: mol_type = other RNA
  modified_base 1: mod_base = OTHER; note = 2'-O-methyluridine-3'-phosphorothioate 5'-(E)-Vinylphosphonate
  modified_base 2: mod_base = OTHER; note = 2'-deoxy-2'-fluorocytidine-3'-phosphorothioate
  modified_base 3: mod_base = OTHER; note = 2'-O-methyladenosine-3'-phosphate
  modified_base 4: mod_base = OTHER; note = 2'-O-methyladenosine-3'-phosphate
  modified_base 5: mod_base = OTHER; note = 2'-O-methyluridine-3'-phosphate
  modified_base 6: mod_base = OTHER; note = 2'-deoxy-2'-fluoroadenosine-3'-phosphate
  modified_base 7: mod_base = OTHER; note = 2'-O-methyluridine-3'-phosphate
  modified_base 8: mod_base = OTHER; note = 2'-O-methyladenosine-3'-phosphate
  modified_base 9: mod_base = OTHER; note = 2'-O-methyladenosine-3'-phosphate
  modified_base 10: mod_base = OTHER; note = 2'-O-methylcytidine-3'-phosphate
  modified_base 11: mod_base = OTHER; note = 2'-O-methyladenosine-3'-phosphate
  modified_base 12: mod_base = OTHER; note = 2'-O-methyluridine-3'-phosphate
  modified_base 13: mod_base = OTHER; note = 2'-O-methyluridine-3'-phosphate
  modified_base 14: mod_base = OTHER; note = 2'-deoxy-2'-fluorouridine-3'-phosphate
  modified_base 15: mod_base = OTHER; note = 2'-O-methylguanosine-3'-phosphate
  modified_base 16: mod_base = OTHER; note = 2'-deoxy-2'-fluoroadenosine-3'-phosphate
  modified_base 17: mod_base = OTHER; note = 2'-O-methylcytidine-3'-phosphate
  modified_base 18: mod_base = OTHER; note = 2'-O-methyladenosine-3'-phosphate
  modified_base 19: mod_base = OTHER; note = 2'-O-methylguanosine-3'-phosphate
  modified_base 20: mod_base = OTHER; note = 2'-O-methylcytidine-3'-phosphate
  modified_base 21: mod_base = OTHER; note = 2'-O-methyladenosine-3'-phosphorothioate
  modified_base 22: mod_base = OTHER; note = 2'-O-methyluridine-3'-phosphorothioate
  modified_base 23: mod_base = OTHER; note = 2'-O-methyladenosine
tcaatataacatttgacagcata

SEQ ID NO: 12977 - RNA, 23 nt, synthetic construct
  source 1..23: mol_type = other RNA
  modified_base 1: mod_base = OTHER; note = 2'-O-methyluridine-3'-phosphorothioate 5'-(E)-Vinylphosphonate
  modified_base 2: mod_base = OTHER; note = 2'-deoxy-2'-fluoroadenosine-3'-phosphorothioate
  modified_base 3: mod_base = OTHER; note = 2'-O-methyladenosine-3'-phosphate
  modified_base 4: mod_base = OTHER; note = 2'-O-methylcytidine-3'-phosphate
  modified_base 5: mod_base = OTHER; note = 2'-O-methyladenosine-3'-phosphate
  modified_base 6: mod_base = OTHER; note = 2'-deoxy-2'-fluoroadenosine-3'-phosphate
  modified_base 7: mod_base = OTHER; note = 2'-O-methyluridine-3'-phosphate
  modified_base 8: mod_base = OTHER; note = 2'-O-methyladenosine-3'-phosphate
  modified_base 9: mod_base = OTHER; note = 2'-O-methyluridine-3'-phosphate
  modified_base 10: mod_base = OTHER; note = 2'-O-methyladenosine-3'-phosphate
  modified_base 11: mod_base = OTHER; note = 2'-O-methyladenosine-3'-phosphate
  modified_base 12: mod_base = OTHER; note = 2'-O-methylcytidine-3'-phosphate
  modified_base 13: mod_base = OTHER; note = 2'-O-methyladenosine-3'-phosphate
  modified_base 14: mod_base = OTHER; note = 2'-deoxy-2'-fluorouridine-3'-phosphate
  modified_base 15: mod_base = OTHER; note = 2'-O-methyluridine-3'-phosphate
  modified_base 16: mod_base = OTHER; note = 2'-deoxy-2'-fluorouridine-3'-phosphate
  modified_base 17: mod_base = OTHER; note = 2'-O-methylguanosine-3'-phosphate
  modified_base 18: mod_base = OTHER; note = 2'-O-methyladenosine-3'-phosphate
  modified_base 19: mod_base = OTHER; note = 2'-O-methylcytidine-3'-phosphate
  modified_base 20: mod_base = OTHER; note = 2'-O-methyladenosine-3'-phosphate
  modified_base 21: mod_base = OTHER; note = 2'-O-methylguanosine-3'-phosphorothioate
  modified_base 22: mod_base = OTHER; note = 2'-O-methylcytidine-3'-phosphorothioate
  modified_base 23: mod_base = OTHER; note = 2'-O-methyladenosine
taacaatataacatttgacagca

SEQ ID NO: 12978 - RNA, 23 nt, synthetic construct
  source 1..23: mol_type = other RNA
  modified_base 1: mod_base = OTHER; note = 2'-O-methyluridine-3'-phosphorothioate 5'-(E)-Vinylphosphonate
  modified_base 2: mod_base = OTHER; note = 2'-deoxy-2'-fluoroadenosine-3'-phosphorothioate
  modified_base 3: mod_base = OTHER; note = 2'-O-methyladenosine-3'-phosphate
  modified_base 4: mod_base = OTHER; note = 2'-O-methyladenosine-3'-phosphate
  modified_base 5: mod_base = OTHER; note = 2'-O-methylcytidine-3'-phosphate
  modified_base 6: mod_base = OTHER; note = 2'-deoxy-2'-fluoroadenosine-3'-phosphate
  modified_base 7: mod_base = OTHER; note = 2'-O-methyladenosine-3'-phosphate
  modified_base 8: mod_base = OTHER; note = 2'-O-methyluridine-3'-phosphate
  modified_base 9: mod_base = OTHER; note = 2'-O-methyladenosine-3'-phosphate
  modified_base 10: mod_base = OTHER; note = 2'-O-methyluridine-3'-phosphate
  modified_base 11: mod_base = OTHER; note = 2'-O-methyladenosine-3'-phosphate
  modified_base 12: mod_base = OTHER; note = 2'-O-methyladenosine-3'-phosphate
  modified_base 13: mod_base = OTHER; note = 2'-O-methylcytidine-3'-phosphate
  modified_base 14: mod_base = OTHER; note = 2'-deoxy-2'-fluoroadenosine-3'-phosphate
  modified_base 15: mod_base = OTHER; note = 2'-O-methyluridine-3'-phosphate
  modified_base 16: mod_base = OTHER; note = 2'-deoxy-2'-fluorouridine-3'-phosphate
  modified_base 17: mod_base = OTHER; note = 2'-O-methyluridine-3'-phosphate
  modified_base 18: mod_base = OTHER; note = 2'-O-methylguanosine-3'-phosphate
  modified_base 19: mod_base = OTHER; note = 2'-O-methyladenosine-3'-phosphate
  modified_base 20: mod_base = OTHER; note = 2'-O-methylcytidine-3'-phosphate
  modified_base 21: mod_base = OTHER; note = 2'-O-methyladenosine-3'-phosphorothioate
  modified_base 22: mod_base = OTHER; note = 2'-O-methylguanosine-3'-phosphorothioate
  modified_base 23: mod_base = OTHER; note = 2'-O-methylcytidine
taaacaatataacatttgacagc

SEQ ID NO: 12979 - RNA, 23 nt, synthetic construct
  source 1..23: mol_type = other RNA
  modified_base 1: mod_base = OTHER; note = 2'-O-methyluridine-3'-phosphorothioate 5'-(E)-Vinylphosphonate
  modified_base 2: mod_base = OTHER; note = 2'-deoxy-2'-fluoroadenosine-3'-phosphorothioate
  modified_base 3: mod_base = OTHER; note = 2'-O-methylcytidine-3'-phosphate
  modified_base 4: mod_base = OTHER; note = 2'-O-methyladenosine-3'-phosphate
  modified_base 5: mod_base = OTHER; note = 2'-O-methylcytidine-3'-phosphate
  modified_base 6: mod_base = OTHER; note = 2'-deoxy-2'-fluorouridine-3'-phosphate
  modified_base 7: mod_base = OTHER; note = 2'-O-methylguanosine-3'-phosphate
  modified_base 8: mod_base = OTHER; note = 2'-O-methyladenosine-3'-phosphate
  modified_base 9: mod_base = OTHER; note = 2'-O-methyluridine-3'-phosphate
  modified_base 10: mod_base = OTHER; note = 2'-O-methyladenosine-3'-phosphate
  modified_base 11: mod_base = OTHER; note = 2'-O-methylcytidine-3'-phosphate
  modified_base 12: mod_base = OTHER; note = 2'-O-methyluridine-3'-phosphate
  modified_base 13: mod_base = OTHER; note = 2'-O-methylcytidine-3'-phosphate
  modified_base 14: mod_base = OTHER; note = 2'-deoxy-2'-fluorouridine-3'-phosphate
  modified_base 15: mod_base = OTHER; note = 2'-O-methylguanosine-3'-phosphate
  modified_base 16: mod_base = OTHER; note = 2'-deoxy-2'-fluoroadenosine-3'-phosphate
  modified_base 17: mod_base = OTHER; note = 2'-O-methyladenosine-3'-phosphate
  modified_base 18: mod_base = OTHER; note = 2'-O-methylcytidine-3'-phosphate
  modified_base 19: mod_base = OTHER; note = 2'-O-methyladenosine-3'-phosphate
  modified_base 20: mod_base = OTHER; note = 2'-O-methyluridine-3'-phosphate
  modified_base 21: mod_base = OTHER; note = 2'-O-methyladenosine-3'-phosphorothioate
  modified_base 22: mod_base = OTHER; note = 2'-O-methyladenosine-3'-phosphorothioate
  modified_base 23: mod_base = OTHER; note = 2'-O-methylcytidine
tacactgatactctgaacataac

SEQ ID NO: 12980 - RNA, 23 nt, synthetic construct
  source 1..23: mol_type = other RNA
  modified_base 1: mod_base = OTHER; note = 2'-O-methyluridine-3'-phosphorothioate 5'-(E)-Vinylphosphonate
  modified_base 2: mod_base = OTHER; note = 2'-deoxy-2'-fluoroadenosine-3'-phosphorothioate
  modified_base 3: mod_base = OTHER; note = 2'-O-methyladenosine-3'-phosphate
  modified_base 4: mod_base = OTHER; note = 2'-O-methylcytidine-3'-phosphate
  modified_base 5: mod_base = OTHER; note = 2'-O-methyladenosine-3'-phosphate
  modified_base 6: mod_base = OTHER; note = 2'-deoxy-2'-fluorocytidine-3'-phosphate
  modified_base 7: mod_base = OTHER; note = 2'-O-methyluridine-3'-phosphate
  modified_base 8: mod_base = OTHER; note = 2'-O-methylguanosine-3'-phosphate
  modified_base 9: mod_base = OTHER; note = 2'-O-methyladenosine-3'-phosphate
  modified_base 10: mod_base = OTHER; note = 2'-O-methyluridine-3'-phosphate
  modified_base 11: mod_base = OTHER; note = 2'-O-methyladenosine-3'-phosphate
  modified_base 12: mod_base = OTHER; note = 2'-O-methylcytidine-3'-phosphate
  modified_base 13: mod_base = OTHER; note = 2'-O-methyluridine-3'-phosphate
  modified_base 14: mod_base = OTHER; note = 2'-deoxy-2'-fluorocytidine-3'-phosphate
  modified_base 15: mod_base = OTHER; note = 2'-O-methyluridine-3'-phosphate
  modified_base 16: mod_base = OTHER; note = 2'-deoxy-2'-fluoroguanosine-3'-phosphate
  modified_base 17: mod_base = OTHER; note = 2'-O-methyladenosine-3'-phosphate
  modified_base 18: mod_base = OTHER; note = 2'-O-methyladenosine-3'-phosphate
  modified_base 19: mod_base = OTHER; note = 2'-O-methylcytidine-3'-phosphate
  modified_base 20: mod_base = OTHER; note = 2'-O-methyladenosine-3'-phosphate
  modified_base 21: mod_base = OTHER; note = 2'-O-methyluridine-3'-phosphorothioate
  modified_base 22: mod_base = OTHER; note = 2'-O-methyladenosine-3'-phosphorothioate
  modified_base 23: mod_base = OTHER; note = 2'-O-methyladenosine
taacactgatactctgaacataa

SEQ ID NO: 12981 - RNA, 23 nt, synthetic construct
  source 1..23: mol_type = other RNA
  modified_base 1: mod_base = OTHER; note = 2'-O-methyluridine-3'-phosphorothioate 5'-(E)-Vinylphosphonate
  modified_base 2: mod_base = OTHER; note = 2'-deoxy-2'-fluoroguanosine-3'-phosphorothioate
  modified_base 3: mod_base = OTHER; note = 2'-O-methyladenosine-3'-phosphate
  modified_base 4: mod_base = OTHER; note = 2'-O-methyladenosine-3'-phosphate
  modified_base 5: mod_base = OTHER; note = 2'-O-methylcytidine-3'-phosphate
  modified_base 6: mod_base = OTHER; note = 2'-deoxy-2'-fluoroadenosine-3'-phosphate
  modified_base 7: mod_base = OTHER; note = 2'-O-methylcytidine-3'-phosphate
  modified_base 8: mod_base = OTHER; note = 2'-O-methyluridine-3'-phosphate
  modified_base 9: mod_base = OTHER; note = 2'-O-methylguanosine-3'-phosphate
  modified_base 10: mod_base = OTHER; note = 2'-O-methyladenosine-3'-phosphate
  modified_base 11: mod_base = OTHER; note = 2'-O-methyluridine-3'-phosphate
  modified_base 12: mod_base = OTHER; note = 2'-O-methyladenosine-3'-phosphate
  modified_base 13: mod_base = OTHER; note = 2'-O-methylcytidine-3'-phosphate
  modified_base 14: mod_base = OTHER; note = 2'-deoxy-2'-fluorouridine-3'-phosphate
  modified_base 15: mod_base = OTHER; note = 2'-O-methylcytidine-3'-phosphate
  modified_base 16: mod_base = OTHER; note = 2'-deoxy-2'-fluorouridine-3'-phosphate
  modified_base 17: mod_base = OTHER; note = 2'-O-methylguanosine-3'-phosphate
  modified_base 18: mod_base = OTHER; note = 2'-O-methyladenosine-3'-phosphate
  modified_base 19: mod_base = OTHER; note = 2'-O-methyladenosine-3'-phosphate
  modified_base 20: mod_base = OTHER; note = 2'-O-methylcytidine-3'-phosphate
  modified_base 21: mod_base = OTHER; note = 2'-O-methyladenosine-3'-phosphorothioate
  modified_base 22: mod_base = OTHER; note = 2'-O-methyluridine-3'-phosphorothioate
  modified_base 23: mod_base = OTHER; note = 2'-O-methyladenosine
tgaacactgatactctgaacata

SEQ ID NO: 12982 - RNA, 23 nt, synthetic construct
  source 1..23: mol_type = other RNA
  modified_base 1: mod_base = OTHER; note = 2'-O-methyluridine-3'-phosphorothioate 5'-(E)-Vinylphosphonate
  modified_base 2: mod_base = OTHER; note = 2'-deoxy-2'-fluoroadenosine-3'-phosphorothioate
  modified_base 3: mod_base = OTHER; note = 2'-O-methylguanosine-3'-phosphate
  modified_base 4: mod_base = OTHER; note = 2'-O-methyladenosine-3'-phosphate
  modified_base 5: mod_base = OTHER; note = 2'-O-methyladenosine-3'-phosphate
  modified_base 6: mod_base = OTHER; note = 2'-deoxy-2'-fluorocytidine-3'-phosphate
  modified_base 7: mod_base = OTHER; note = 2'-O-methyladenosine-3'-phosphate
  modified_base 8: mod_base = OTHER; note = 2'-O-methylcytidine-3'-phosphate
  modified_base 9: mod_base = OTHER; note = 2'-O-methyluridine-3'-phosphate
  modified_base 10: mod_base = OTHER; note = 2'-O-methylguanosine-3'-phosphate
  modified_base 11: mod_base = OTHER; note = 2'-O-methyladenosine-3'-phosphate
  modified_base 12: mod_base = OTHER; note = 2'-O-methyluridine-3'-phosphate
  modified_base 13: mod_base = OTHER; note = 2'-O-methyladenosine-3'-phosphate
  modified_base 14: mod_base = OTHER; note = 2'-deoxy-2'-fluorocytidine-3'-phosphate
  modified_base 15: mod_base = OTHER; note = 2'-O-methyluridine-3'-phosphate
  modified_base 16: mod_base = OTHER; note = 2'-deoxy-2'-fluorocytidine-3'-phosphate
  modified_base 17: mod_base = OTHER; note = 2'-O-methyluridine-3'-phosphate
  modified_base 18: mod_base = OTHER; note = 2'-O-methylguanosine-3'-phosphate
  modified_base 19: mod_base = OTHER; note = 2'-O-methyladenosine-3'-phosphate
  modified_base 20: mod_base = OTHER; note = 2'-O-methyladenosine-3'-phosphate
  modified_base 21: mod_base = OTHER; note = 2'-O-methylcytidine-3'-phosphorothioate
  modified_base 22: mod_base = OTHER; note = 2'-O-methyladenosine-3'-phosphorothioate
  modified_base 23: mod_base = OTHER; note = 2'-O-methyluridine
tagaacactgatactctgaacat

SEQ ID NO: 12983 - RNA, 23 nt, synthetic construct
  source 1..23: mol_type = other RNA
  modified_base 1: mod_base = OTHER; note = 2'-O-methyluridine-3'-phosphorothioate 5'-(E)-Vinylphosphonate
  modified_base 2: mod_base = OTHER; note = 2'-deoxy-2'-fluoroadenosine-3'-phosphorothioate
  modified_base 3: mod_base = OTHER; note = 2'-O-methyladenosine-3'-phosphate
  modified_base 4: mod_base = OTHER; note = 2'-O-methylguanosine-3'-phosphate
  modified_base 5: mod_base = OTHER; note = 2'-O-methyladenosine-3'-phosphate
  modified_base 6: mod_base = OTHER; note = 2'-deoxy-2'-fluoroadenosine-3'-phosphate
  modified_base 7: mod_base = OTHER; note = 2'-O-methylcytidine-3'-phosphate
  modified_base 8: mod_base = OTHER; note = 2'-O-methyladenosine-3'-phosphate
  modified_base 9: mod_base = OTHER; note = 2'-O-methylcytidine-3'-phosphate
  modified_base 10: mod_base = OTHER; note = 2'-O-methyluridine-3'-phosphate
  modified_base 11: mod_base = OTHER; note = 2'-O-methylguanosine-3'-phosphate
  modified_base 12: mod_base = OTHER; note = 2'-O-methyladenosine-3'-phosphate
  modified_base 13: mod_base = OTHER; note = 2'-O-methyluridine-3'-phosphate
  modified_base 14: mod_base = OTHER; note = 2'-deoxy-2'-fluoroadenosine-3'-phosphate
  modified_base 15: mod_base = OTHER; note = 2'-O-methylcytidine-3'-phosphate
  modified_base 16: mod_base = OTHER; note = 2'-deoxy-2'-fluorouridine-3'-phosphate
  modified_base 17: mod_base = OTHER; note = 2'-O-methylcytidine-3'-phosphate
  modified_base 18: mod_base = OTHER; note = 2'-O-methyluridine-3'-phosphate
  modified_base 19: mod_base = OTHER; note = 2'-O-methylguanosine-3'-phosphate
  modified_base 20: mod_base = OTHER; note = 2'-O-methyladenosine-3'-phosphate
  modified_base 21: mod_base = OTHER; note = 2'-O-methyladenosine-3'-phosphorothioate
  modified_base 22: mod_base = OTHER; note = 2'-O-methylcytidine-3'-phosphorothioate
  modified_base 23: mod_base = OTHER; note = 2'-O-methyladenosine
taagaacactgatactctgaaca

SEQ ID NO: 12984 - RNA, 23 nt, synthetic construct
  source 1..23: mol_type = other RNA
  modified_base 1: mod_base = OTHER; note = 2'-O-methyluridine-3'-phosphorothioate 5'-(E)-Vinylphosphonate
  modified_base 2: mod_base = OTHER; note = 2'-deoxy-2'-fluoroadenosine-3'-phosphorothioate
  modified_base 3: mod_base = OTHER; note = 2'-O-methyladenosine-3'-phosphate
  modified_base 4: mod_base = OTHER; note = 2'-O-methyladenosine-3'-phosphate
  modified_base 5: mod_base = OTHER; note = 2'-O-methylguanosine-3'-phosphate
  modified_base 6: mod_base = OTHER; note = 2'-deoxy-2'-fluoroadenosine-3'-phosphate
  modified_base 7: mod_base = OTHER; note = 2'-O-methyladenosine-3'-phosphate
  modified_base 8: mod_base = OTHER; note = 2'-O-methylcytidine-3'-phosphate
  modified_base 9: mod_base = OTHER; note = 2'-O-methyladenosine-3'-phosphate
  modified_base 10: mod_base = OTHER; note = 2'-O-methylcytidine-3'-phosphate
  modified_base 11: mod_base = OTHER; note = 2'-O-methyluridine-3'-phosphate
  modified_base 12: mod_base = OTHER; note = 2'-O-methylguanosine-3'-phosphate
  modified_base 13: mod_base = OTHER; note = 2'-O-methyladenosine-3'-phosphate
  modified_base 14: mod_base = OTHER; note = 2'-deoxy-2'-fluorouridine-3'-phosphate
  modified_base 15: mod_base = OTHER; note = 2'-O-methyladenosine-3'-phosphate
  modified_base 16: mod_base = OTHER; note = 2'-deoxy-2'-fluorocytidine-3'-phosphate
  modified_base 17: mod_base = OTHER; note = 2'-O-methyluridine-3'-phosphate
  modified_base 18: mod_base = OTHER; note = 2'-O-methylcytidine-3'-phosphate
  modified_base 19: mod_base = OTHER; note = 2'-O-methyluridine-3'-phosphate
  modified_base 20: mod_base = OTHER; note = 2'-O-methylguanosine-3'-phosphate
  modified_base 21: mod_base = OTHER; note = 2'-O-methyladenosine-3'-phosphorothioate
  modified_base 22: mod_base = OTHER; note = 2'-O-methyladenosine-3'-phosphorothioate
  modified_base 23: mod_base = OTHER; note = 2'-O-methylcytidine
taaagaacactgatactctgaac

SEQ ID NO: 12985 - RNA, 23 nt, synthetic construct
  source 1..23: mol_type = other RNA
  modified_base 1: mod_base = OTHER; note = 2'-O-methyluridine-3'-phosphorothioate 5'-(E)-Vinylphosphonate
  modified_base 2: mod_base = OTHER; note = 2'-deoxy-2'-fluorouridine-3'-phosphorothioate
  modified_base 3: mod_base = OTHER; note = 2'-O-methyladenosine-3'-phosphate
  modified_base 4: mod_base = OTHER; note = 2'-O-methyladenosine-3'-phosphate
  modified_base 5: mod_base = OTHER; note = 2'-O-methyladenosine-3'-phosphate
  modified_base 6: mod_base = OTHER; note = 2'-deoxy-2'-fluoroguanosine-3'-phosphate
  modified_base 7: mod_base = OTHER; note = 2'-O-methyladenosine-3'-phosphate
  modified_base 8: mod_base = OTHER; note = 2'-O-methyladenosine-3'-phosphate
  modified_base 9: mod_base = OTHER; note = 2'-O-methylcytidine-3'-phosphate
  modified_base 10: mod_base = OTHER; note = 2'-O-methyladenosine-3'-phosphate
  modified_base 11: mod_base = OTHER; note = 2'-O-methylcytidine-3'-phosphate
  modified_base 12: mod_base = OTHER; note = 2'-O-methyluridine-3'-phosphate
  modified_base 13: mod_base = OTHER; note = 2'-O-methylguanosine-3'-phosphate
  modified_base 14: mod_base = OTHER; note = 2'-deoxy-2'-fluoroadenosine-3'-phosphate
  modified_base 15: mod_base = OTHER; note = 2'-O-methyluridine-3'-phosphate
  modified_base 16: mod_base = OTHER; note = 2'-deoxy-2'-fluoroadenosine-3'-phosphate
  modified_base 17: mod_base = OTHER; note = 2'-O-methylcytidine-3'-phosphate
  modified_base 18: mod_base = OTHER; note = 2'-O-methyluridine-3'-phosphate
  modified_base 19: mod_base = OTHER; note = 2'-O-methylcytidine-3'-phosphate
  modified_base 20: mod_base = OTHER; note = 2'-O-methyluridine-3'-phosphate
  modified_base 21: mod_base = OTHER; note = 2'-O-methylguanosine-3'-phosphorothioate
  modified_base 22: mod_base = OTHER; note = 2'-O-methyladenosine-3'-phosphorothioate
  modified_base 23: mod_base = OTHER; note = 2'-O-methyladenosine
ttaaagaacactgatactctgaa

SEQ ID NO: 12986 - RNA, 23 nt, synthetic construct
  source 1..23: mol_type = other RNA
  modified_base 1: mod_base = OTHER; note = 2'-O-methyluridine-3'-phosphorothioate 5'-(E)-Vinylphosphonate
  modified_base 2: mod_base = OTHER; note = 2'-deoxy-2'-fluoroguanosine-3'-phosphorothioate
  modified_base 3: mod_base = OTHER; note = 2'-O-methyluridine-3'-phosphate
  modified_base 4: mod_base = OTHER; note = 2'-O-methyladenosine-3'-phosphate
  modified_base 5: mod_base = OTHER; note = 2'-O-methyladenosine-3'-phosphate
  modified_base 6: mod_base = OTHER; note = 2'-deoxy-2'-fluoroadenosine-3'-phosphate
  modified_base 7: mod_base = OTHER; note = 2'-O-methylguanosine-3'-phosphate
  modified_base 8: mod_base = OTHER; note = 2'-O-methyladenosine-3'-phosphate
  modified_base 9: mod_base = OTHER; note = 2'-O-methyladenosine-3'-phosphate
  modified_base 10: mod_base = OTHER; note = 2'-O-methylcytidine-3'-phosphate
  modified_base 11: mod_base = OTHER; note = 2'-O-methyladenosine-3'-phosphate
  modified_base 12: mod_base = OTHER; note = 2'-O-methylcytidine-3'-phosphate
  modified_base 13: mod_base = OTHER; note = 2'-O-methyluridine-3'-phosphate
  modified_base 14: mod_base = OTHER; note = 2'-deoxy-2'-fluoroguanosine-3'-phosphate
  modified_base 15: mod_base = OTHER; note = 2'-O-methyladenosine-3'-phosphate
  modified_base 16: mod_base = OTHER; note = 2'-deoxy-2'-fluorouridine-3'-phosphate
  modified_base 17: mod_base = OTHER; note = 2'-O-methyladenosine-3'-phosphate
  modified_base 18: mod_base = OTHER; note = 2'-O-methylcytidine-3'-phosphate
  modified_base 19: mod_base = OTHER; note = 2'-O-methyluridine-3'-phosphate
  modified_base 20: mod_base = OTHER; note = 2'-O-methylcytidine-3'-phosphate
  modified_base 21: mod_base = OTHER; note = 2'-O-methyluridine-3'-phosphorothioate
  modified_base 22: mod_base = OTHER; note = 2'-O-methylguanosine-3'-phosphorothioate
  modified_base 23: mod_base = OTHER; note = 2'-O-methyladenosine
tgtaaagaacactgatactctga

SEQ ID NO: 12987 - RNA, 23 nt, synthetic construct
  source 1..23: mol_type = other RNA
  modified_base 1: mod_base = OTHER; note = 2'-O-methyluridine-3'-phosphorothioate 5'-(E)-Vinylphosphonate
  modified_base 2: mod_base = OTHER; note = 2'-deoxy-2'-fluoroadenosine-3'-phosphorothioate
  modified_base 3: mod_base = OTHER; note = 2'-O-methylguanosine-3'-phosphate
  modified_base 4: mod_base = OTHER; note = 2'-O-methyluridine-3'-phosphate
  modified_base 5: mod_base = OTHER; note = 2'-O-methyladenosine-3'-phosphate
  modified_base 6: mod_base = OTHER; note = 2'-deoxy-2'-fluoroadenosine-3'-phosphate
  modified_base 7: mod_base = OTHER; note = 2'-O-methyladenosine-3'-phosphate
  modified_base 8: mod_base = OTHER; note = 2'-O-methylguanosine-3'-phosphate
  modified_base 9: mod_base = OTHER; note = 2'-O-methyladenosine-3'-phosphate
  modified_base 10: mod_base = OTHER; note = 2'-O-methyladenosine-3'-phosphate
  modified_base 11: mod_base = OTHER; note = 2'-O-methylcytidine-3'-phosphate
  modified_base 12: mod_base = OTHER; note = 2'-O-methyladenosine-3'-phosphate
  modified_base 13: mod_base = OTHER; note = 2'-O-methylcytidine-3'-phosphate
  modified_base 14: mod_base = OTHER; note = 2'-deoxy-2'-fluorouridine-3'-phosphate
  modified_base 15: mod_base = OTHER; note = 2'-O-methylguanosine-3'-phosphate
  modified_base 16: mod_base = OTHER; note = 2'-deoxy-2'-fluoroadenosine-3'-phosphate
  modified_base 17: mod_base = OTHER; note = 2'-O-methyluridine-3'-phosphate
  modified_base 18: mod_base = OTHER; note = 2'-O-methyladenosine-3'-phosphate
  modified_base 19: mod_base = OTHER; note = 2'-O-methylcytidine-3'-phosphate
  modified_base 20: mod_base = OTHER; note = 2'-O-methyluridine-3'-phosphate
  modified_base 21: mod_base = OTHER; note = 2'-O-methylcytidine-3'-phosphorothioate
  modified_base 22: mod_base = OTHER; note = 2'-O-methyluridine-3'-phosphorothioate
  modified_base 23: mod_base = OTHER; note = 2'-O-methylguanosine
tagtaaagaacactgatactctg

SEQ ID NO: 12988 - RNA, 23 nt, synthetic construct
  source 1..23: mol_type = other RNA
  modified_base 1: mod_base = OTHER; note = 2'-O-methyluridine-3'-phosphorothioate 5'-(E)-Vinylphosphonate
  modified_base 2: mod_base = OTHER; note = 2'-deoxy-2'-fluoroguanosine-3'-phosphorothioate
  modified_base 3: mod_base = OTHER; note = 2'-O-methyladenosine-3'-phosphate
  modified_base 4: mod_base = OTHER; note = 2'-O-methylguanosine-3'-phosphate
  modified_base 5: mod_base = OTHER; note = 2'-O-methyluridine-3'-phosphate
  modified_base 6: mod_base = OTHER; note = 2'-deoxy-2'-fluoroadenosine-3'-phosphate
  modified_base 7: mod_base = OTHER; note = 2'-O-methyladenosine-3'-phosphate
  modified_base 8: mod_base = OTHER; note = 2'-O-methyladenosine-3'-phosphate
  modified_base 9: mod_base = OTHER; note = 2'-O-methylguanosine-3'-phosphate
  modified_base 10: mod_base = OTHER; note = 2'-O-methyladenosine-3'-phosphate
  modified_base 11: mod_base = OTHER; note = 2'-O-methyladenosine-3'-phosphate
  modified_base 12: mod_base = OTHER; note = 2'-O-methylcytidine-3'-phosphate
  modified_base 13: mod_base = OTHER; note = 2'-O-methyladenosine-3'-phosphate
  modified_base 14: mod_base = OTHER; note = 2'-deoxy-2'-fluorocytidine-3'-phosphate
  modified_base 15: mod_base = OTHER; note = 2'-O-methyluridine-3'-phosphate
  modified_base 16: mod_base = OTHER; note = 2'-deoxy-2'-fluoroguanosine-3'-phosphate
  modified_base 17: mod_base = OTHER; note = 2'-O-methyladenosine-3'-phosphate
  modified_base 18: mod_base = OTHER; note = 2'-O-methyluridine-3'-phosphate
  modified_base 19: mod_base = OTHER; note = 2'-O-methyladenosine-3'-phosphate
  modified_base 20: mod_base = OTHER; note = 2'-O-methylcytidine-3'-phosphate
  modified_base 21: mod_base = OTHER; note = 2'-O-methyluridine-3'-phosphorothioate
  modified_base 22: mod_base = OTHER; note = 2'-O-methylcytidine-3'-phosphorothioate
  modified_base 23: mod_base = OTHER; note = 2'-O-methyluridine
tgagtaaagaacactgatactct

SEQ ID NO: 12989 - RNA, 23 nt, synthetic construct
  source 1..23: mol_type = other RNA
  modified_base 1: mod_base = OTHER; note = 2'-O-methyluridine-3'-phosphorothioate 5'-(E)-Vinylphosphonate
  modified_base 2: mod_base = OTHER; note = 2'-deoxy-2'-fluoroguanosine-3'-phosphorothioate
  modified_base 3: mod_base = OTHER; note = 2'-O-methylguanosine-3'-phosphate
  modified_base 4: mod_base = OTHER; note = 2'-O-methyladenosine-3'-phosphate
  modified_base 5: mod_base = OTHER; note = 2'-O-methylguanosine-3'-phosphate
  modified_base 6: mod_base = OTHER; note = 2'-deoxy-2'-fluorouridine-3'-phosphate
  modified_base 7: mod_base = OTHER; note = 2'-O-methyladenosine-3'-phosphate
  modified_base 8: mod_base = OTHER; note = 2'-O-methyladenosine-3'-phosphate
  modified_base 9: mod_base = OTHER; note = 2'-O-methyladenosine-3'-phosphate
  modified_base 10: mod_base = OTHER; note = 2'-O-methylguanosine-3'-phosphate
  modified_base 11: mod_base = OTHER; note = 2'-O-methyladenosine-3'-phosphate
  modified_base 12: mod_base = OTHER; note = 2'-O-methyladenosine-3'-phosphate
  modified_base 13: mod_base = OTHER; note = 2'-O-methylcytidine-3'-phosphate
  modified_base 14: mod_base = OTHER; note = 2'-deoxy-2'-fluoroadenosine-3'-phosphate
  modified_base 15: mod_base = OTHER; note = 2'-O-methylcytidine-3'-phosphate
  modified_base 16: mod_base = OTHER; note = 2'-deoxy-2'-fluorouridine-3'-phosphate
  modified_base 17: mod_base = OTHER; note = 2'-O-methylguanosine-3'-phosphate
  modified_base 18: mod_base = OTHER; note = 2'-O-methyladenosine-3'-phosphate
  modified_base 19: mod_base = OTHER; note = 2'-O-methyluridine-3'-phosphate
  modified_base 20: mod_base = OTHER; note = 2'-O-methyladenosine-3'-phosphate
  modified_base 21: mod_base = OTHER; note = 2'-O-methylcytidine-3'-phosphorothioate
  modified_base 22: mod_base = OTHER; note = 2'-O-methyluridine-3'-phosphorothioate
  modified_base 23: mod_base = OTHER; note = 2'-O-methylcytidine
tggagtaaagaacactgatactc

SEQ ID NO: 12990 - RNA, 23 nt, synthetic construct
  source 1..23: mol_type = other RNA
  modified_base 1: mod_base = OTHER; note = 2'-O-methyluridine-3'-phosphorothioate 5'-(E)-Vinylphosphonate
  modified_base 2: mod_base = OTHER; note = 2'-deoxy-2'-fluoroadenosine-3'-phosphorothioate
  modified_base 3: mod_base = OTHER; note = 2'-O-methyluridine-3'-phosphate
  modified_base 4: mod_base = OTHER; note = 2'-O-methyladenosine-3'-phosphate
  modified_base 5: mod_base = OTHER; note = 2'-O-methyluridine-3'-phosphate
  modified_base 6: mod_base = OTHER; note = 2'-deoxy-2'-fluorocytidine-3'-phosphate
  modified_base 7: mod_base = OTHER; note = 2'-O-methyluridine-3'-phosphate
  modified_base 8: mod_base = OTHER; note = 2'-O-methylguanosine-3'-phosphate
  modified_base 9: mod_base = OTHER; note = 2'-O-methyluridine-3'-phosphate
  modified_base 10: mod_base = OTHER; note = 2'-O-methyladenosine-3'-phosphate
  modified_base 11: mod_base = OTHER; note = 2'-O-methyladenosine-3'-phosphate
  modified_base 12: mod_base = OTHER; note = 2'-O-methylguanosine-3'-phosphate
  modified_base 13: mod_base = OTHER; note = 2'-O-methylguanosine-3'-phosphate
  modified_base 14: mod_base = OTHER; note = 2'-deoxy-2'-fluoroadenosine-3'-phosphate
  modified_base 15: mod_base = OTHER; note = 2'-O-methylguanosine-3'-phosphate
  modified_base 16: mod_base = OTHER; note = 2'-deoxy-2'-fluorouridine-3'-phosphate
  modified_base 17: mod_base = OTHER; note = 2'-O-methyladenosine-3'-phosphate
  modified_base 18: mod_base = OTHER; note = 2'-O-methyladenosine-3'-phosphate
  modified_base 19: mod_base = OTHER; note = 2'-O-methyladenosine-3'-phosphate
  modified_base 20: mod_base = OTHER; note = 2'-O-methylguanosine-3'-phosphate
  modified_base 21: mod_base = OTHER; note = 2'-O-methyladenosine-3'-phosphorothioate
  modified_base 22: mod_base = OTHER; note = 2'-O-methyladenosine-3'-phosphorothioate
  modified_base 23: mod_base = OTHER; note = 2'-O-methylcytidine
tatatctgtaaggagtaaagaac

SEQ ID NO: 12991 - RNA, 23 nt, synthetic construct
  source 1..23: mol_type = other RNA
  modified_base 1: mod_base = OTHER; note = 2'-O-methyluridine-3'-phosphorothioate 5'-(E)-Vinylphosphonate
  modified_base 2: mod_base = OTHER; note = 2'-deoxy-2'-fluoroadenosine-3'-phosphorothioate
  modified_base 3: mod_base = OTHER; note = 2'-O-methyladenosine-3'-phosphate
  modified_base 4: mod_base = OTHER; note = 2'-O-methyladenosine-3'-phosphate
  modified_base 5: mod_base = OTHER; note = 2'-O-methyladenosine-3'-phosphate
  modified_base 6: mod_base = OTHER; note = 2'-deoxy-2'-fluorouridine-3'-phosphate
  modified_base 7: mod_base = OTHER; note = 2'-O-methyladenosine-3'-phosphate
  modified_base 8: mod_base = OTHER; note = 2'-O-methyluridine-3'-phosphate
  modified_base 9: mod_base = OTHER; note = 2'-O-methylcytidine-3'-phosphate
  modified_base 10: mod_base = OTHER; note = 2'-O-methyluridine-3'-phosphate
  modified_base 11: mod_base = OTHER; note = 2'-O-methylguanosine-3'-phosphate
  modified_base 12: mod_base = OTHER; note = 2'-O-methyluridine-3'-phosphate
  modified_base 13: mod_base = OTHER; note = 2'-O-methyladenosine-3'-phosphate
  modified_base 14: mod_base = OTHER; note = 2'-deoxy-2'-fluoroadenosine-3'-phosphate
  modified_base 15: mod_base = OTHER; note = 2'-O-methylguanosine-3'-phosphate
  modified_base 16: mod_base = OTHER; note = 2'-deoxy-2'-fluoroguanosine-3'-phosphate
  modified_base 17: mod_base = OTHER; note = 2'-O-methyladenosine-3'-phosphate
  modified_base 18: mod_base = OTHER; note = 2'-O-methylguanosine-3'-phosphate
  modified_base 19: mod_base = OTHER; note = 2'-O-methyluridine-3'-phosphate
  modified_base 20: mod_base = OTHER; note = 2'-O-methyladenosine-3'-phosphate
  modified_base 21: mod_base = OTHER; note = 2'-O-methyladenosine-3'-phosphorothioate
  modified_base 22: mod_base = OTHER; note = 2'-O-methyladenosine-3'-phosphorothioate
  modified_base 23: mod_base = OTHER; note = 2'-O-methylguanosine
taaaatatctgtaaggagtaaag

SEQ ID NO: 12992 - RNA, 23 nt, synthetic construct
  source 1..23: mol_type = other RNA
  modified_base 1: mod_base = OTHER; note = 2'-O-methyluridine-3'-phosphorothioate 5'-(E)-Vinylphosphonate
  modified_base 2: mod_base = OTHER; note = 2'-deoxy-2'-fluoroadenosine-3'-phosphorothioate
  modified_base 3: mod_base = OTHER; note = 2'-O-methylguanosine-3'-phosphate
  modified_base 4: mod_base = OTHER; note = 2'-O-methyladenosine-3'-phosphate
  modified_base 5: mod_base = OTHER; note = 2'-O-methyladenosine-3'-phosphate
  modified_base 6: mod_base = OTHER; note = 2'-deoxy-2'-fluoroadenosine-3'-phosphate
  modified_base 7: mod_base = OTHER; note = 2'-O-methylguanosine-3'-phosphate
  modified_base 8: mod_base = OTHER; note = 2'-O-methyluridine-3'-phosphate
  modified_base 9: mod_base = OTHER; note = 2'-O-methylguanosine-3'-phosphate
  modified_base 10: mod_base = OTHER; note = 2'-O-methyladenosine-3'-phosphate
  modified_base 11: mod_base = OTHER; note = 2'-O-methyluridine-3'-phosphate
  modified_base 12: mod_base = OTHER; note = 2'-O-methylguanosine-3'-phosphate
  modified_base 13: mod_base = OTHER; note = 2'-O-methylcytidine-3'-phosphate
  modified_base 14: mod_base = OTHER; note = 2'-deoxy-2'-fluorouridine-3'-phosphate
  modified_base 15: mod_base = OTHER; note = 2'-O-methylguanosine-3'-phosphate
  modified_base 16: mod_base = OTHER; note = 2'-deoxy-2'-fluorocytidine-3'-phosphate
  modified_base 17: mod_base = OTHER; note = 2'-O-methyladenosine-3'-phosphate
  modified_base 18: mod_base = OTHER; note = 2'-O-methyluridine-3'-phosphate
  modified_base 19: mod_base = OTHER; note = 2'-O-methyluridine-3'-phosphate
  modified_base 20: mod_base = OTHER; note = 2'-O-methyluridine-3'-phosphate
  modified_base 21: mod_base = OTHER; note = 2'-O-methyladenosine-3'-phosphorothioate
  modified_base 22: mod_base = OTHER; note = 2'-O-methyladenosine-3'-phosphorothioate
  modified_base 23: mod_base = OTHER; note = 2'-O-methyladenosine
tagaaagtgatgctgcatttaaa

SEQ ID NO: 12993 - RNA, 23 nt, synthetic construct
  source 1..23: mol_type = other RNA
  modified_base 1: mod_base = OTHER; note = 2'-O-methyluridine-3'-phosphorothioate 5'-(E)-Vinylphosphonate
  modified_base 2: mod_base = OTHER; note = 2'-deoxy-2'-fluorouridine-3'-phosphorothioate
  modified_base 3: mod_base = OTHER; note = 2'-O-methyluridine-3'-phosphate
  modified_base 4: mod_base = OTHER; note = 2'-O-methyladenosine-3'-phosphate
  modified_base 5: mod_base = OTHER; note = 2'-O-methyluridine-3'-phosphate
  modified_base 6: mod_base = OTHER; note = 2'-deoxy-2'-fluorouridine-3'-phosphate
  modified_base 7: mod_base = OTHER; note = 2'-O-methyluridine-3'-phosphate
  modified_base 8: mod_base = OTHER; note = 2'-O-methyluridine-3'-phosphate
  modified_base 9: mod_base = OTHER; note = 2'-O-methylcytidine-3'-phosphate
  modified_base 10: mod_base = OTHER; note = 2'-O-methyladenosine-3'-phosphate
  modified_base 11: mod_base = OTHER; note = 2'-O-methylguanosine-3'-phosphate
  modified_base 12: mod_base = OTHER; note = 2'-O-methyladenosine-3'-phosphate
  modified_base 13: mod_base = OTHER; note = 2'-O-methyladenosine-3'-phosphate
  modified_base 14: mod_base = OTHER; note = 2'-deoxy-2'-fluoroadenosine-3'-phosphate
  modified_base 15: mod_base = OTHER; note = 2'-O-methylguanosine-3'-phosphate
  modified_base 16: mod_base = OTHER; note = 2'-deoxy-2'-fluorouridine-3'-phosphate
  modified_base 17: mod_base = OTHER; note = 2'-O-methylguanosine-3'-phosphate
  modified_base 18: mod_base = OTHER; note = 2'-O-methyladenosine-3'-phosphate
  modified_base 19: mod_base = OTHER; note = 2'-O-methyluridine-3'-phosphate
  modified_base 20: mod_base = OTHER; note = 2'-O-methylguanosine-3'-phosphate
  modified_base 21: mod_base = OTHER; note = 2'-O-methylcytidine-3'-phosphorothioate
  modified_base 22: mod_base = OTHER; note = 2'-O-methyluridine-3'-phosphorothioate
  modified_base 23: mod_base = OTHER; note = 2'-O-methylguanosine
tttattttcagaaagtgatgctg

SEQ ID NO: 12994 - RNA, 23 nt, synthetic construct
  source 1..23: mol_type = other RNA
  modified_base 1: mod_base = OTHER; note = 2'-O-methyluridine-3'-phosphorothioate 5'-(E)-Vinylphosphonate
  modified_base 2: mod_base = OTHER; note = 2'-deoxy-2'-fluoroguanosine-3'-phosphorothioate
  modified_base 3: mod_base = OTHER; note = 2'-O-methyladenosine-3'-phosphate
  modified_base 4: mod_base = OTHER; note = 2'-O-methylcytidine-3'-phosphate
  modified_base 5: mod_base = OTHER; note = 2'-O-methyladenosine-3'-phosphate
  modified_base 6: mod_base = OTHER; note = 2'-deoxy-2'-fluoroadenosine-3'-phosphate
  modified_base 7: mod_base = OTHER; note = 2'-O-methylcytidine-3'-phosphate
  modified_base 8: mod_base = OTHER; note = 2'-O-methyladenosine-3'-phosphate
  modified_base 9: mod_base = OTHER; note = 2'-O-methyladenosine-3'-phosphate
  modified_base 10: mod_base = OTHER; note = 2'-O-methyladenosine-3'-phosphate
  modified_base 11: mod_base = OTHER; note = 2'-O-methyluridine-3'-phosphate
  modified_base 12: mod_base = OTHER; note = 2'-O-methyladenosine-3'-phosphate
  modified_base 13: mod_base = OTHER; note = 2'-O-methyladenosine-3'-phosphate
  modified_base 14: mod_base = OTHER; note = 2'-deoxy-2'-fluorouridine-3'-phosphate
  modified_base 15: mod_base = OTHER; note = 2'-O-methylguanosine-3'-phosphate
  modified_base 16: mod_base = OTHER; note = 2'-deoxy-2'-fluorouridine-3'-phosphate
  modified_base 17: mod_base = OTHER; note = 2'-O-methyluridine-3'-phosphate
  modified_base 18: mod_base = OTHER; note = 2'-O-methyluridine-3'-phosphate
  modified_base 19: mod_base = OTHER; note = 2'-O-methylcytidine-3'-phosphate
  modified_base 20: mod_base = OTHER; note = 2'-O-methyluridine-3'-phosphate
  modified_base 21: mod_base = OTHER; note = 2'-O-methylcytidine-3'-phosphorothioate
  modified_base 22: mod_base = OTHER; note = 2'-O-methyluridine-3'-phosphorothioate
  modified_base 23: mod_base = OTHER; note = 2'-O-methyluridine
tgacaacaaataatgtttctctt

SEQ ID NO: 12995 - RNA, 23 nt, synthetic construct
  source 1..23: mol_type = other RNA
  modified_base 1: mod_base = OTHER; note = 2'-O-methyluridine-3'-phosphorothioate 5'-(E)-Vinylphosphonate
  modified_base 2: mod_base = OTHER; note = 2'-deoxy-2'-fluoroadenosine-3'-phosphorothioate
  modified_base 3: mod_base = OTHER; note = 2'-O-methyluridine-3'-phosphate
  modified_base 4: mod_base = OTHER; note = 2'-O-methylguanosine-3'-phosphate
  modified_base 5: mod_base = OTHER; note = 2'-O-methylcytidine-3'-phosphate
  modified_base 6: mod_base = OTHER; note = 2'-deoxy-2'-fluorouridine-3'-phosphate
  modified_base 7: mod_base = OTHER; note = 2'-O-methylguanosine-3'-phosphate
  modified_base 8: mod_base = OTHER; note = 2'-O-methyladenosine-3'-phosphate
  modified_base 9: mod_base = OTHER; note = 2'-O-methyladenosine-3'-phosphate
  modified_base 10: mod_base = OTHER; note = 2'-O-methyladenosine-3'-phosphate
  modified_base 11: mod_base = OTHER; note = 2'-O-methyluridine-3'-phosphate
  modified_base 12: mod_base = OTHER; note = 2'-O-methyladenosine-3'-phosphate
  modified_base 13: mod_base = OTHER; note = 2'-O-methylcytidine-3'-phosphate
  modified_base 14: mod_base = OTHER; note = 2'-deoxy-2'-fluorouridine-3'-phosphate
  modified_base 15: mod_base = OTHER; note = 2'-O-methylguanosine-3'-phosphate
  modified_base 16: mod_base = OTHER; note = 2'-deoxy-2'-fluoroadenosine-3'-phosphate
  modified_base 17: mod_base = OTHER; note = 2'-O-methylcytidine-3'-phosphate
  modified_base 18: mod_base = OTHER; note = 2'-O-methyladenosine-3'-phosphate
  modified_base 19: mod_base = OTHER; note = 2'-O-methyladenosine-3'-phosphate
  modified_base 20: mod_base = OTHER; note = 2'-O-methylcytidine-3'-phosphate
  modified_base 21: mod_base = OTHER; note = 2'-O-methyladenosine-3'-phosphorothioate
  modified_base 22: mod_base = OTHER; note = 2'-O-methyladenosine-3'-phosphorothioate
  modified_base 23: mod_base = OTHER; note = 2'-O-methyladenosine
tatgctgaaatactgacaacaaa

SEQ ID NO: 12996 - RNA, 23 nt, synthetic construct
  source 1..23: mol_type = other RNA
  modified_base 1: mod_base = OTHER; note = 2'-O-methyluridine-3'-phosphorothioate 5'-(E)-Vinylphosphonate
  modified_base 2: mod_base = OTHER; note = 2'-deoxy-2'-fluoroadenosine-3'-phosphorothioate
  modified_base 3: mod_base = OTHER; note = 2'-O-methylcytidine-3'-phosphate
  modified_base 4: mod_base = OTHER; note = 2'-O-methyladenosine-3'-phosphate
  modified_base 5: mod_base = OTHER; note = 2'-O-methyladenosine-3'-phosphate
  modified_base 6: mod_base = OTHER; note = 2'-deoxy-2'-fluoroguanosine-3'-phosphate
  modified_base 7: mod_base = OTHER; note = 2'-O-methyluridine-3'-phosphate
  modified_base 8: mod_base = OTHER; note = 2'-O-methyluridine-3'-phosphate
  modified_base 9: mod_base = OTHER; note = 2'-O-methylcytidine-3'-phosphate
  modified_base 10: mod_base = OTHER; note = 2'-O-methyladenosine-3'-phosphate
  modified_base 11: mod_base = OTHER; note = 2'-O-methyluridine-3'-phosphate
  modified_base 12: mod_base = OTHER; note = 2'-O-methylguanosine-3'-phosphate
  modified_base 13: mod_base = OTHER; note = 2'-O-methylcytidine-3'-phosphate
  modified_base 14: mod_base = OTHER; note = 2'-deoxy-2'-fluorouridine-3'-phosphate
  modified_base 15: mod_base = OTHER; note = 2'-O-methylguanosine-3'-phosphate
  modified_base 16: mod_base = OTHER; note = 2'-deoxy-2'-fluoroadenosine-3'-phosphate
  modified_base 17: mod_base = OTHER; note = 2'-O-methyladenosine-3'-phosphate
  modified_base 18: mod_base = OTHER; note = 2'-O-methyladenosine-3'-phosphate
  modified_base 19: mod_base = OTHER; note = 2'-O-methyluridine-3'-phosphate
  modified_base 20: mod_base = OTHER; note = 2'-O-methyladenosine-3'-phosphate
  modified_base 21: mod_base = OTHER; note = 2'-O-methylcytidine-3'-phosphorothioate
  modified_base 22: mod_base = OTHER; note = 2'-O-methyluridine-3'-phosphorothioate
  modified_base 23: mod_base = OTHER; note = 2'-O-methylguanosine
tacaagttcatgctgaaatactg

SEQ ID NO: 12997 - RNA, 23 nt, synthetic construct
  source 1..23: mol_type = other RNA
  modified_base 1: mod_base = OTHER; note = 2'-O-methyluridine-3'-phosphorothioate 5'-(E)-Vinylphosphonate
  modified_base 2: mod_base = OTHER; note = 2'-deoxy-2'-fluoroadenosine-3'-phosphorothioate
  modified_base 3: mod_base = OTHER; note = 2'-O-methyladenosine-3'-phosphate
  modified_base 4: mod_base = OTHER; note = 2'-O-methylcytidine-3'-phosphate
  modified_base 5: mod_base = OTHER; note = 2'-O-methyladenosine-3'-phosphate
  modified_base 6: mod_base = OTHER; note = 2'-deoxy-2'-fluoroguanosine-3'-phosphate
  modified_base 7: mod_base = OTHER; note = 2'-O-methyladenosine-3'-phosphate
  modified_base 8: mod_base = OTHER; note = 2'-O-methyladenosine-3'-phosphate
  modified_base 9: mod_base = OTHER; note = 2'-O-methyluridine-3'-phosphate
  modified_base 10: mod_base = OTHER; note = 2'-O-methylcytidine-3'-phosphate
  modified_base 11: mod_base = OTHER; note = 2'-O-methyluridine-3'-phosphate
  modified_base 12: mod_base = OTHER; note = 2'-O-methylguanosine-3'-phosphate
  modified_base 13: mod_base = OTHER; note = 2'-O-methyluridine-3'-phosphate
  modified_base 14: mod_base = OTHER; note = 2'-deoxy-2'-fluoroadenosine-3'-phosphate
  modified_base 15: mod_base = OTHER; note = 2'-O-methylcytidine-3'-phosphate
  modified_base 16: mod_base = OTHER; note = 2'-deoxy-2'-fluorocytidine-3'-phosphate
  modified_base 17: mod_base = OTHER; note = 2'-O-methyladenosine-3'-phosphate
  modified_base 18: mod_base = OTHER; note = 2'-O-methyladenosine-3'-phosphate
  modified_base 19: mod_base = OTHER; note = 2'-O-methyluridine-3'-phosphate
  modified_base 20: mod_base = OTHER; note = 2'-O-methyluridine-3'-phosphate
  modified_base 21: mod_base = OTHER; note = 2'-O-methyladenosine-3'-phosphorothioate
  modified_base 22: mod_base = OTHER; note = 2'-O-methylcytidine-3'-phosphorothioate
  modified_base 23: mod_base = OTHER; note = 2'-O-methyladenosine
taacagaatctgtaccaattaca

SEQ ID NO: 12998 - RNA, 23 nt, synthetic construct
  source 1..23: mol_type = other RNA
  modified_base 1: mod_base = OTHER; note = 2'-O-methyluridine-3'-phosphorothioate 5'-(E)-Vinylphosphonate
  modified_base 2: mod_base = OTHER; note = 2'-deoxy-2'-fluoroadenosine-3'-phosphorothioate
  modified_base 3: mod_base = OTHER; note = 2'-O-methylguanosine-3'-phosphate
  modified_base 4: mod_base = OTHER; note = 2'-O-methyladenosine-3'-phosphate
  modified_base 5: mod_base = OTHER; note = 2'-O-methyladenosine-3'-phosphate
  modified_base 6: mod_base = OTHER; note = 2'-deoxy-2'-fluorouridine-3'-phosphate
  modified_base 7: mod_base = OTHER; note = 2'-O-methylcytidine-3'-phosphate
  modified_base 8: mod_base = OTHER; note = 2'-O-methyluridine-3'-phosphate
  modified_base 9: mod_base = OTHER; note = 2'-O-methylguanosine-3'-phosphate
  modified_base 10: mod_base = OTHER; note = 2'-O-methyluridine-3'-phosphate
  modified_base 11: mod_base = OTHER; note = 2'-O-methyladenosine-3'-phosphate
  modified_base 12: mod_base = OTHER; note = 2'-O-methylcytidine-3'-phosphate
  modified_base 13: mod_base = OTHER; note = 2'-O-methylcytidine-3'-phosphate
  modified_base 14: mod_base = OTHER; note = 2'-deoxy-2'-fluoroadenosine-3'-phosphate
  modified_base 15: mod_base = OTHER; note = 2'-O-methyladenosine-3'-phosphate
  modified_base 16: mod_base = OTHER; note = 2'-deoxy-2'-fluorouridine-3'-phosphate
  modified_base 17: mod_base = OTHER; note = 2'-O-methyluridine-3'-phosphate
  modified_base 18: mod_base = OTHER; note = 2'-O-methyladenosine-3'-phosphate
  modified_base 19: mod_base = OTHER; note = 2'-O-methylcytidine-3'-phosphate
  modified_base 20: mod_base = OTHER; note = 2'-O-methyladenosine-3'-phosphate
  modified_base 21: mod_base = OTHER; note = 2'-O-methyladenosine-3'-phosphorothioate
  modified_base 22: mod_base = OTHER; note = 2'-O-methyladenosine-3'-phosphorothioate
  modified_base 23: mod_base = OTHER; note = 2'-O-methylcytidine
tagaatctgtaccaattacaaac

SEQ ID NO: 12999 - RNA, 23 nt, synthetic construct
  source 1..23: mol_type = other RNA
  modified_base 1: mod_base = OTHER; note = 2'-O-methyluridine-3'-phosphorothioate 5'-(E)-Vinylphosphonate
  modified_base 2: mod_base = OTHER; note = 2'-deoxy-2'-fluorocytidine-3'-phosphorothioate
  modified_base 3: mod_base = OTHER; note = 2'-O-methyladenosine-3'-phosphate
  modified_base 4: mod_base = OTHER; note = 2'-O-methylguanosine-3'-phosphate
  modified_base 5: mod_base = OTHER; note = 2'-O-methyladenosine-3'-phosphate
  modified_base 6: mod_base = OTHER; note = 2'-deoxy-2'-fluoroadenosine-3'-phosphate
  modified_base 7: mod_base = OTHER; note = 2'-O-methyluridine-3'-phosphate
  modified_base 8: mod_base = OTHER; note = 2'-O-methylcytidine-3'-phosphate
  modified_base 9: mod_base = OTHER; note = 2'-O-methyluridine-3'-phosphate
  modified_base 10: mod_base = OTHER; note = 2'-O-methylguanosine-3'-phosphate
  modified_base 11: mod_base = OTHER; note = 2'-O-methyluridine-3'-phosphate
  modified_base 12: mod_base = OTHER; note = 2'-O-methyladenosine-3'-phosphate
  modified_base 13: mod_base = OTHER; note = 2'-O-methylcytidine-3'-phosphate
  modified_base 14: mod_base = OTHER; note = 2'-deoxy-2'-fluorocytidine-3'-phosphate
  modified_base 15: mod_base = OTHER; note = 2'-O-methyladenosine-3'-phosphate
  modified_base 16: mod_base = OTHER; note = 2'-deoxy-2'-fluoroadenosine-3'-phosphate
  modified_base 17: mod_base = OTHER; note = 2'-O-methyluridine-3'-phosphate
  modified_base 18: mod_base = OTHER; note = 2'-O-methyluridine-3'-phosphate
  modified_base 19: mod_base = OTHER; note = 2'-O-methyladenosine-3'-phosphate
  modified_base 20: mod_base = OTHER; note = 2'-O-methylcytidine-3'-phosphate
  modified_base 21: mod_base = OTHER; note = 2'-O-methyladenosine-3'-phosphorothioate
  modified_base 22: mod_base = OTHER; note = 2'-O-methyladenosine-3'-phosphorothioate
  modified_base 23: mod_base = OTHER; note = 2'-O-methyladenosine
tcagaatctgtaccaattacaaa

SEQ ID NO: 13000 - RNA, 23 nt, synthetic construct
  source 1..23: mol_type = other RNA
  modified_base 1: mod_base = OTHER; note = 2'-O-methyluridine-3'-phosphorothioate 5'-(E)-Vinylphosphonate
  modified_base 2: mod_base = OTHER; note = 2'-deoxy-2'-fluoroadenosine-3'-phosphorothioate
  modified_base 3: mod_base = OTHER; note = 2'-O-methylcytidine-3'-phosphate
  modified_base 4: mod_base = OTHER; note = 2'-O-methyladenosine-3'-phosphate
  modified_base 5: mod_base = OTHER; note = 2'-O-methylguanosine-3'-phosphate
  modified_base 6: mod_base = OTHER; note = 2'-deoxy-2'-fluoroadenosine-3'-phosphate
  modified_base 7: mod_base = OTHER; note = 2'-O-methyladenosine-3'-phosphate
  modified_base 8: mod_base = OTHER; note = 2'-O-methyluridine-3'-phosphate
  modified_base 9: mod_base = OTHER; note = 2'-O-methylcytidine-3'-phosphate
  modified_base 10: mod_base = OTHER; note = 2'-O-methyluridine-3'-phosphate
  modified_base 11: mod_base = OTHER; note = 2'-O-methylguanosine-3'-phosphate
  modified_base 12: mod_base = OTHER; note = 2'-O-methyluridine-3'-phosphate
  modified_base 13: mod_base = OTHER; note = 2'-O-methyladenosine-3'-phosphate
  modified_base 14: mod_base = OTHER; note = 2'-deoxy-2'-fluorocytidine-3'-phosphate
  modified_base 15: mod_base = OTHER; note = 2'-O-methylcytidine-3'-phosphate
  modified_base 16: mod_base = OTHER; note = 2'-deoxy-2'-fluoroadenosine-3'-phosphate
  modified_base 17: mod_base = OTHER; note = 2'-O-methyladenosine-3'-phosphate
  modified_base 18: mod_base = OTHER; note = 2'-O-methyluridine-3'-phosphate
  modified_base 19: mod_base = OTHER; note = 2'-O-methyluridine-3'-phosphate
  modified_base 20: mod_base = OTHER; note = 2'-O-methyladenosine-3'-phosphate
  modified_base 21: mod_base = OTHER; note = 2'-O-methylcytidine-3'-phosphorothioate
  modified_base 22: mod_base = OTHER; note = 2'-O-methyladenosine-3'-phosphorothioate
  modified_base 23: mod_base = OTHER; note = 2'-O-methyladenosine
tacagaatctgtaccaattacaa

SEQ ID NO: 13001 - RNA, 23 nt, synthetic construct
  source 1..23: mol_type = other RNA
  modified_base 1: mod_base = OTHER; note = 2'-O-methyluridine-3'-phosphorothioate 5'-(E)-Vinylphosphonate
  modified_base 2: mod_base = OTHER; note = 2'-deoxy-2'-fluorocytidine-3'-phosphorothioate
  modified_base 3: mod_base = OTHER; note = 2'-O-methyladenosine-3'-phosphate
  modified_base 4: mod_base = OTHER; note = 2'-O-methyladenosine-3'-phosphate
  modified_base 5: mod_base = OTHER; note = 2'-O-methylcytidine-3'-phosphate
  modified_base 6: mod_base = OTHER; note = 2'-deoxy-2'-fluoroadenosine-3'-phosphate
  modified_base 7: mod_base = OTHER; note = 2'-O-methylguanosine-3'-phosphate
  modified_base 8: mod_base = OTHER; note = 2'-O-methyladenosine-3'-phosphate
  modified_base 9: mod_base = OTHER; note = 2'-O-methyladenosine-3'-phosphate
  modified_base 10: mod_base = OTHER; note = 2'-O-methyluridine-3'-phosphate
  modified_base 11: mod_base = OTHER; note = 2'-O-methylcytidine-3'-phosphate
  modified_base 12: mod_base = OTHER; note = 2'-O-methyluridine-3'-phosphate
  modified_base 13: mod_base = OTHER; note = 2'-O-methylguanosine-3'-phosphate
  modified_base 14: mod_base = OTHER; note = 2'-deoxy-2'-fluorouridine-3'-phosphate
  modified_base 15: mod_base = OTHER; note = 2'-O-methyladenosine-3'-phosphate
  modified_base 16: mod_base = OTHER; note = 2'-deoxy-2'-fluorocytidine-3'-phosphate
  modified_base 17: mod_base = OTHER; note = 2'-O-methylcytidine-3'-phosphate
  modified_base 18: mod_base = OTHER; note = 2'-O-methyladenosine-3'-phosphate
  modified_base 19: mod_base = OTHER; note = 2'-O-methyladenosine-3'-phosphate
  modified_base 20: mod_base = OTHER; note = 2'-O-methyluridine-3'-phosphate
  modified_base 21: mod_base = OTHER; note = 2'-O-methyluridine-3'-phosphorothioate
  modified_base 22: mod_base = OTHER; note = 2'-O-methyladenosine-3'-phosphorothioate
  modified_base 23: mod_base = OTHER; note = 2'-O-methylcytidine
tcaacagaatctgtaccaattac

SEQ ID NO: 13002 - RNA, 23 nt, synthetic construct
  source 1..23: mol_type = other RNA
  modified_base 1: mod_base = OTHER; note = 2'-O-methyluridine-3'-phosphorothioate 5'-(E)-Vinylphosphonate
  modified_base 2: mod_base = OTHER; note = 2'-deoxy-2'-fluoroadenosine-3'-phosphorothioate
  modified_base 3: mod_base = OTHER; note = 2'-O-methylcytidine-3'-phosphate
  modified_base 4: mod_base = OTHER; note = 2'-O-methyladenosine-3'-phosphate
  modified_base 5: mod_base = OTHER; note = 2'-O-methyladenosine-3'-phosphate
  modified_base 6: mod_base = OTHER; note = 2'-deoxy-2'-fluorocytidine-3'-phosphate
  modified_base 7: mod_base = OTHER; note = 2'-O-methyladenosine-3'-phosphate
  modified_base 8: mod_base = OTHER; note = 2'-O-methylguanosine-3'-phosphate
  modified_base 9: mod_base = OTHER; note = 2'-O-methyladenosine-3'-phosphate
  modified_base 10: mod_base = OTHER; note = 2'-O-methyladenosine-3'-phosphate
  modified_base 11: mod_base = OTHER; note = 2'-O-methyluridine-3'-phosphate
  modified_base 12: mod_base = OTHER; note = 2'-O-methylcytidine-3'-phosphate
  modified_base 13: mod_base = OTHER; note = 2'-O-methyluridine-3'-phosphate
  modified_base 14: mod_base = OTHER; note = 2'-deoxy-2'-fluoroguanosine-3'-phosphate
  modified_base 15: mod_base = OTHER; note = 2'-O-methyluridine-3'-phosphate
  modified_base 16: mod_base = OTHER; note = 2'-deoxy-2'-fluoroadenosine-3'-phosphate
  modified_base 17: mod_base = OTHER; note = 2'-O-methylcytidine-3'-phosphate
  modified_base 18: mod_base = OTHER; note = 2'-O-methylcytidine-3'-phosphate
  modified_base 19: mod_base = OTHER; note = 2'-O-methyladenosine-3'-phosphate
  modified_base 20: mod_base = OTHER; note = 2'-O-methyladenosine-3'-phosphate
  modified_base 21: mod_base = OTHER; note = 2'-O-methyluridine-3'-phosphorothioate
  modified_base 22: mod_base = OTHER; note = 2'-O-methyluridine-3'-phosphorothioate
  modified_base 23: mod_base = OTHER; note = 2'-O-methyladenosine
tacaacagaatctgtaccaatta

SEQ ID NO: 13003 - RNA, 23 nt, synthetic construct
  source 1..23: mol_type = other RNA
  modified_base 1: mod_base = OTHER; note = 2'-O-methyluridine-3'-phosphorothioate 5'-(E)-Vinylphosphonate
  modified_base 2: mod_base = OTHER; note = 2'-deoxy-2'-fluorouridine-3'-phosphorothioate
  modified_base 3: mod_base = OTHER; note = 2'-O-methyladenosine-3'-phosphate
  modified_base 4: mod_base = OTHER; note = 2'-O-methylcytidine-3'-phosphate
  modified_base 5: mod_base = OTHER; note = 2'-O-methyladenosine-3'-phosphate
  modified_base 6: mod_base = OTHER; note = 2'-deoxy-2'-fluoroadenosine-3'-phosphate
  modified_base 7: mod_base = OTHER; note = 2'-O-methylcytidine-3'-phosphate
  modified_base 8: mod_base = OTHER; note = 2'-O-methyladenosine-3'-phosphate
  modified_base 9: mod_base = OTHER; note = 2'-O-methylguanosine-3'-phosphate
  modified_base 10: mod_base = OTHER; note = 2'-O-methyladenosine-3'-phosphate
  modified_base 11: mod_base = OTHER; note = 2'-O-methyladenosine-3'-phosphate
  modified_base 12: mod_base = OTHER; note = 2'-O-methyluridine-3'-phosphate
  modified_base 13: mod_base = OTHER; note = 2'-O-methylcytidine-3'-phosphate
  modified_base 14: mod_base = OTHER; note = 2'-deoxy-2'-fluorouridine-3'-phosphate
  modified_base 15: mod_base = OTHER; note = 2'-O-methylguanosine-3'-phosphate
  modified_base 16: mod_base = OTHER; note = 2'-deoxy-2'-fluorouridine-3'-phosphate
  modified_base 17: mod_base = OTHER; note = 2'-O-methyladenosine-3'-phosphate
  modified_base 18: mod_base = OTHER; note = 2'-O-methylcytidine-3'-phosphate
  modified_base 19: mod_base = OTHER; note = 2'-O-methylcytidine-3'-phosphate
  modified_base 20: mod_base = OTHER; note = 2'-O-methyladenosine-3'-phosphate
  modified_base 21: mod_base = OTHER; note = 2'-O-methyladenosine-3'-phosphorothioate
  modified_base 22: mod_base = OTHER; note = 2'-O-methyluridine-3'-phosphorothioate
  modified_base 23: mod_base = OTHER; note = 2'-O-methyluridine
ttacaacagaatctgtaccaatt

SEQ ID NO: 13004 - RNA, 23 nt, synthetic construct
  source 1..23: mol_type = other RNA
  modified_base 1: mod_base = OTHER; note = 2'-O-methyluridine-3'-phosphorothioate 5'-(E)-Vinylphosphonate
  modified_base 2: mod_base = OTHER; note = 2'-deoxy-2'-fluoroadenosine-3'-phosphorothioate
  modified_base 3: mod_base = OTHER; note = 2'-O-methyluridine-3'-phosphate
  modified_base 4: mod_base = OTHER; note = 2'-O-methyladenosine-3'-phosphate
  modified_base 5: mod_base = OTHER; note = 2'-O-methylcytidine-3'-phosphate
  modified_base 6: mod_base = OTHER; note = 2'-deoxy-2'-fluoroadenosine-3'-phosphate
  modified_base 7: mod_base = OTHER; note = 2'-O-methyladenosine-3'-phosphate
  modified_base 8: mod_base = OTHER; note = 2'-O-methylcytidine-3'-phosphate
  modified_base 9: mod_base = OTHER; note = 2'-O-methyladenosine-3'-phosphate
  modified_base 10: mod_base = OTHER; note = 2'-O-methylguanosine-3'-phosphate
  modified_base 11: mod_base = OTHER; note = 2'-O-methyladenosine-3'-phosphate
  modified_base 12: mod_base = OTHER; note = 2'-O-methyladenosine-3'-phosphate
  modified_base 13: mod_base = OTHER; note = 2'-O-methyluridine-3'-phosphate
  modified_base 14: mod_base = OTHER; note = 2'-deoxy-2'-fluorocytidine-3'-phosphate
  modified_base 15: mod_base = OTHER; note = 2'-O-methyluridine-3'-phosphate
  modified_base 16: mod_base = OTHER; note = 2'-deoxy-2'-fluoroguanosine-3'-phosphate
  modified_base 17: mod_base = OTHER; note = 2'-O-methyluridine-3'-phosphate
  modified_base 18: mod_base = OTHER; note = 2'-O-methyladenosine-3'-phosphate
  modified_base 19: mod_base = OTHER; note = 2'-O-methylcytidine-3'-phosphate
  modified_base 20: mod_base = OTHER; note = 2'-O-methylcytidine-3'-phosphate
  modified_base 21: mod_base = OTHER; note = 2'-O-methyladenosine-3'-phosphorothioate
  modified_base 22: mod_base = OTHER; note = 2'-O-methyladenosine-3'-phosphorothioate
  modified_base 23: mod_base = OTHER; note = 2'-O-methyluridine
tatacaacagaatctgtaccaat

SEQ ID NO: 13005 - RNA, 23 nt, synthetic construct
  source 1..23: mol_type = other RNA
  modified_base 1: mod_base = OTHER; note = 2'-O-methyluridine-3'-phosphorothioate 5'-(E)-Vinylphosphonate
  modified_base 2: mod_base = OTHER; note = 2'-deoxy-2'-fluorocytidine-3'-phosphorothioate
  modified_base 3: mod_base = OTHER; note = 2'-O-methyladenosine-3'-phosphate
  modified_base 4: mod_base = OTHER; note = 2'-O-methyluridine-3'-phosphate
  modified_base 5: mod_base = OTHER; note = 2'-O-methyladenosine-3'-phosphate
  modified_base 6: mod_base = OTHER; note = 2'-deoxy-2'-fluorocytidine-3'-phosphate
  modified_base 7: mod_base = OTHER; note = 2'-O-methyladenosine-3'-phosphate
  modified_base 8: mod_base = OTHER; note = 2'-O-methyladenosine-3'-phosphate
  modified_base 9: mod_base = OTHER; note = 2'-O-methylcytidine-3'-phosphate
  modified_base 10: mod_base = OTHER; note = 2'-O-methyladenosine-3'-phosphate
  modified_base 11: mod_base = OTHER; note = 2'-O-methylguanosine-3'-phosphate
  modified_base 12: mod_base = OTHER; note = 2'-O-methyladenosine-3'-phosphate
  modified_base 13: mod_base = OTHER; note = 2'-O-methyladenosine-3'-phosphate
  modified_base 14: mod_base = OTHER; note = 2'-deoxy-2'-fluorouridine-3'-phosphate
  modified_base 15: mod_base = OTHER; note = 2'-O-methylcytidine-3'-phosphate
  modified_base 16: mod_base = OTHER; note = 2'-deoxy-2'-fluorouridine-3'-phosphate
  modified_base 17: mod_base = OTHER; note = 2'-O-methylguanosine-3'-phosphate
  modified_base 18: mod_base = OTHER; note = 2'-O-methyluridine-3'-phosphate
  modified_base 19: mod_base = OTHER; note = 2'-O-methyladenosine-3'-phosphate
  modified_base 20: mod_base = OTHER; note = 2'-O-methylcytidine-3'-phosphate
  modified_base 21: mod_base = OTHER; note = 2'-O-methylcytidine-3'-phosphorothioate
  modified_base 22: mod_base = OTHER; note = 2'-O-methyladenosine-3'-phosphorothioate
  modified_base 23: mod_base = OTHER; note = 2'-O-methyladenosine
tcatacaacagaatctgtaccaa

SEQ ID NO: 13006 - RNA, 23 nt, synthetic construct
  source 1..23: mol_type = other RNA
  modified_base 1: mod_base = OTHER; note = 2'-O-methyluridine-3'-phosphorothioate 5'-(E)-Vinylphosphonate
  modified_base 2: mod_base = OTHER; note = 2'-deoxy-2'-fluoroguanosine-3'-phosphorothioate
  modified_base 3: mod_base = OTHER; note = 2'-O-methylcytidine-3'-phosphate
  modified_base 4: mod_base = OTHER; note = 2'-O-methyladenosine-3'-phosphate
  modified_base 5: mod_base = OTHER; note = 2'-O-methyluridine-3'-phosphate
  modified_base 6: mod_base = OTHER; note = 2'-deoxy-2'-fluoroadenosine-3'-phosphate
  modified_base 7: mod_base = OTHER; note = 2'-O-methylcytidine-3'-phosphate
  modified_base 8: mod_base = OTHER; note = 2'-O-methyladenosine-3'-phosphate
  modified_base 9: mod_base = OTHER; note = 2'-O-methyladenosine-3'-phosphate
  modified_base 10: mod_base = OTHER; note = 2'-O-methylcytidine-3'-phosphate
  modified_base 11: mod_base = OTHER; note = 2'-O-methyladenosine-3'-phosphate
  modified_base 12: mod_base = OTHER; note = 2'-O-methylguanosine-3'-phosphate
  modified_base 13: mod_base = OTHER; note = 2'-O-methyladenosine-3'-phosphate
  modified_base 14: mod_base = OTHER; note = 2'-deoxy-2'-fluoroadenosine-3'-phosphate
  modified_base 15: mod_base = OTHER; note = 2'-O-methyluridine-3'-phosphate
  modified_base 16: mod_base = OTHER; note = 2'-deoxy-2'-fluorocytidine-3'-phosphate
  modified_base 17: mod_base = OTHER; note = 2'-O-methyluridine-3'-phosphate
  modified_base 18: mod_base = OTHER; note = 2'-O-methylguanosine-3'-phosphate
  modified_base 19: mod_base = OTHER; note = 2'-O-methyluridine-3'-phosphate
  modified_base 20: mod_base = OTHER; note = 2'-O-methyladenosine-3'-phosphate
  modified_base 21: mod_base = OTHER; note = 2'-O-methylcytidine-3'-phosphorothioate
  modified_base 22: mod_base = OTHER; note = 2'-O-methylcytidine-3'-phosphorothioate
  modified_base 23: mod_base = OTHER; note = 2'-O-methyladenosine
tgcatacaacagaatctgtacca

SEQ ID NO: 13007 - RNA, 23 nt, synthetic construct
  source 1..23: mol_type = other RNA
  modified_base 1: mod_base = OTHER; note = 2'-O-methyluridine-3'-phosphorothioate 5'-(E)-Vinylphosphonate
  modified_base 2: mod_base = OTHER; note = 2'-deoxy-2'-fluoroadenosine-3'-phosphorothioate
  modified_base 3: mod_base = OTHER; note = 2'-O-methylguanosine-3'-phosphate
  modified_base 4: mod_base = OTHER; note = 2'-O-methylcytidine-3'-phosphate
  modified_base 5: mod_base = OTHER; note = 2'-O-methyladenosine-3'-phosphate
  modified_base 6: mod_base = OTHER; note = 2'-deoxy-2'-fluorouridine-3'-phosphate
  modified_base 7: mod_base = OTHER; note = 2'-O-methyladenosine-3'-phosphate
  modified_base 8: mod_base = OTHER; note = 2'-O-methylcytidine-3'-phosphate
  modified_base 9: mod_base = OTHER; note = 2'-O-methyladenosine-3'-phosphate
  modified_base 10: mod_base = OTHER; note = 2'-O-methyladenosine-3'-phosphate
  modified_base 11: mod_base = OTHER; note = 2'-O-methylcytidine-3'-phosphate
  modified_base 12: mod_base = OTHER; note = 2'-O-methyladenosine-3'-phosphate
  modified_base 13: mod_base = OTHER; note = 2'-O-methylguanosine-3'-phosphate
  modified_base 14: mod_base = OTHER; note = 2'-deoxy-2'-fluoroadenosine-3'-phosphate
  modified_base 15: mod_base = OTHER; note = 2'-O-methyladenosine-3'-phosphate
  modified_base 16: mod_base = OTHER; note = 2'-deoxy-2'-fluorouridine-3'-phosphate
  modified_base 17: mod_base = OTHER; note = 2'-O-methylcytidine-3'-phosphate
  modified_base 18: mod_base = OTHER; note = 2'-O-methyluridine-3'-phosphate
  modified_base 19: mod_base = OTHER; note = 2'-O-methylguanosine-3'-phosphate
  modified_base 20: mod_base = OTHER; note = 2'-O-methyluridine-3'-phosphate
  modified_base 21: mod_base = OTHER; note = 2'-O-methyladenosine-3'-phosphorothioate
  modified_base 22: mod_base = OTHER; note = 2'-O-methylcytidine-3'-phosphorothioate
  modified_base 23: mod_base = OTHER; note = 2'-O-methylcytidine
tagcatacaacagaatctgtacc

SEQ ID NO: 13008 - RNA, 23 nt, synthetic construct
  source 1..23: mol_type = other RNA
  modified_base 1: mod_base = OTHER; note = 2'-O-methyluridine-3'-phosphorothioate 5'-(E)-Vinylphosphonate
  modified_base 2: mod_base = OTHER; note = 2'-deoxy-2'-fluoroadenosine-3'-phosphorothioate
  modified_base 3: mod_base = OTHER; note = 2'-O-methyladenosine-3'-phosphate
  modified_base 4: mod_base = OTHER; note = 2'-O-methylguanosine-3'-phosphate
  modified_base 5: mod_base = OTHER; note = 2'-O-methylcytidine-3'-phosphate
  modified_base 6: mod_base = OTHER; note = 2'-deoxy-2'-fluoroadenosine-3'-phosphate
  modified_base 7: mod_base = OTHER; note = 2'-O-methyluridine-3'-phosphate
  modified_base 8: mod_base = OTHER; note = 2'-O-methyladenosine-3'-phosphate
  modified_base 9: mod_base = OTHER; note = 2'-O-methylcytidine-3'-phosphate
  modified_base 10: mod_base = OTHER; note = 2'-O-methyladenosine-3'-phosphate
  modified_base 11: mod_base = OTHER; note = 2'-O-methyladenosine-3'-phosphate
  modified_base 12: mod_base = OTHER; note = 2'-O-methylcytidine-3'-phosphate
  modified_base 13: mod_base = OTHER; note = 2'-O-methyladenosine-3'-phosphate
  modified_base 14: mod_base = OTHER; note = 2'-deoxy-2'-fluoroguanosine-3'-phosphate
  modified_base 15: mod_base = OTHER; note = 2'-O-methyladenosine-3'-phosphate
  modified_base 16: mod_base = OTHER; note = 2'-deoxy-2'-fluoroadenosine-3'-phosphate
  modified_base 17: mod_base = OTHER; note = 2'-O-methyluridine-3'-phosphate
  modified_base 18: mod_base = OTHER; note = 2'-O-methylcytidine-3'-phosphate
  modified_base 19: mod_base = OTHER; note = 2'-O-methyluridine-3'-phosphate
  modified_base 20: mod_base = OTHER; note = 2'-O-methylguanosine-3'-phosphate
  modified_base 21: mod_base = OTHER; note = 2'-O-methyluridine-3'-phosphorothioate
  modified_base 22: mod_base = OTHER; note = 2'-O-methyladenosine-3'-phosphorothioate
  modified_base 23: mod_base = OTHER; note = 2'-O-methylcytidine
taagcatacaacagaatctgtac

SEQ ID NO: 13009 - RNA, 23 nt, synthetic construct
  source 1..23: mol_type = other RNA
  modified_base 1: mod_base = OTHER; note = 2'-O-methyluridine-3'-phosphorothioate 5'-(E)-Vinylphosphonate
  modified_base 2: mod_base = OTHER; note = 2'-deoxy-2'-fluoroadenosine-3'-phosphorothioate
  modified_base 3: mod_base = OTHER; note = 2'-O-methyladenosine-3'-phosphate
  modified_base 4: mod_base = OTHER; note = 2'-O-methyladenosine-3'-phosphate
  modified_base 5: mod_base = OTHER; note = 2'-O-methylguanosine-3'-phosphate
  modified_base 6: mod_base = OTHER; note = 2'-deoxy-2'-fluorocytidine-3'-phosphate
  modified_base 7: mod_base = OTHER; note = 2'-O-methyladenosine-3'-phosphate
  modified_base 8: mod_base = OTHER; note = 2'-O-methyluridine-3'-phosphate
  modified_base 9: mod_base = OTHER; note = 2'-O-methyladenosine-3'-phosphate
  modified_base 10: mod_base = OTHER; note = 2'-O-methylcytidine-3'-phosphate
  modified_base 11: mod_base = OTHER; note = 2'-O-methyladenosine-3'-phosphate
  modified_base 12: mod_base = OTHER; note = 2'-O-methyladenosine-3'-phosphate
  modified_base 13: mod_base = OTHER; note = 2'-O-methylcytidine-3'-phosphate
  modified_base 14: mod_base = OTHER; note = 2'-deoxy-2'-fluoroadenosine-3'-phosphate
  modified_base 15: mod_base = OTHER; note = 2'-O-methylguanosine-3'-phosphate
  modified_base 16: mod_base = OTHER; note = 2'-deoxy-2'-fluoroadenosine-3'-phosphate
  modified_base 17: mod_base = OTHER; note = 2'-O-methyladenosine-3'-phosphate
  modified_base 18: mod_base = OTHER; note = 2'-O-methyluridine-3'-phosphate
  modified_base 19: mod_base = OTHER; note = 2'-O-methylcytidine-3'-phosphate
  modified_base 20: mod_base = OTHER; note = 2'-O-methyluridine-3'-phosphate
  modified_base 21: mod_base = OTHER; note = 2'-O-methylguanosine-3'-phosphorothioate
  modified_base 22: mod_base = OTHER; note = 2'-O-methyluridine-3'-phosphorothioate
  modified_base 23: mod_base = OTHER; note = 2'-O-methyladenosine
taaagcatacaacagaatctgta

SEQ ID NO: 13010 - RNA, 23 nt, synthetic construct
  source 1..23: mol_type = other RNA
  modified_base 1: mod_base = OTHER; note = 2'-O-methyluridine-3'-phosphorothioate 5'-(E)-Vinylphosphonate
  modified_base 2: mod_base = OTHER; note = 2'-deoxy-2'-fluoroadenosine-3'-phosphorothioate
  modified_base 3: mod_base = OTHER; note = 2'-O-methyladenosine-3'-phosphate
  modified_base 4: mod_base = OTHER; note = 2'-O-methyluridine-3'-phosphate
  modified_base 5: mod_base = OTHER; note = 2'-O-methyluridine-3'-phosphate
  modified_base 6: mod_base = OTHER; note = 2'-deoxy-2'-fluoroadenosine-3'-phosphate
  modified_base 7: mod_base = OTHER; note = 2'-O-methyladenosine-3'-phosphate
  modified_base 8: mod_base = OTHER; note = 2'-O-methylguanosine-3'-phosphate
  modified_base 9: mod_base = OTHER; note = 2'-O-methyladenosine-3'-phosphate
  modified_base 10: mod_base = OTHER; note = 2'-O-methyladenosine-3'-phosphate
  modified_base 11: mod_base = OTHER; note = 2'-O-methyluridine-3'-phosphate
  modified_base 12: mod_base = OTHER; note = 2'-O-methyluridine-3'-phosphate
  modified_base 13: mod_base = OTHER; note = 2'-O-methylcytidine-3'-phosphate
  modified_base 14: mod_base = OTHER; note = 2'-deoxy-2'-fluorouridine-3'-phosphate
  modified_base 15: mod_base = OTHER; note = 2'-O-methyladenosine-3'-phosphate
  modified_base 16: mod_base = OTHER; note = 2'-deoxy-2'-fluoroguanosine-3'-phosphate
  modified_base 17: mod_base = OTHER; note = 2'-O-methyladenosine-3'-phosphate
  modified_base 18: mod_base = OTHER; note = 2'-O-methyluridine-3'-phosphate
  modified_base 19: mod_base = OTHER; note = 2'-O-methylguanosine-3'-phosphate
  modified_base 20: mod_base = OTHER; note = 2'-O-methyluridine-3'-phosphate
  modified_base 21: mod_base = OTHER; note = 2'-O-methylguanosine-3'-phosphorothioate
  modified_base 22: mod_base = OTHER; note = 2'-O-methyladenosine-3'-phosphorothioate
  modified_base 23: mod_base = OTHER; note = 2'-O-methylcytidine
taattaagaattctagatgtgac

SEQ ID NO: 13011 - RNA, 23 nt, synthetic construct
  source 1..23: mol_type = other RNA
  modified_base 1: mod_base = OTHER; note = 2'-O-methyluridine-3'-phosphorothioate 5'-(E)-Vinylphosphonate
  modified_base 2: mod_base = OTHER; note = 2'-deoxy-2'-fluoroguanosine-3'-phosphorothioate
  modified_base 3: mod_base = OTHER; note = 2'-O-methyladenosine-3'-phosphate
  modified_base 4: mod_base = OTHER; note = 2'-O-methyladenosine-3'-phosphate
  modified_base 5: mod_base = OTHER; note = 2'-O-methyladenosine-3'-phosphate
  modified_base 6: mod_base = OTHER; note = 2'-deoxy-2'-fluoroguanosine-3'-phosphate
  modified_base 7: mod_base = OTHER; note = 2'-O-methylcytidine-3'-phosphate
  modified_base 8: mod_base = OTHER; note = 2'-O-methyladenosine-3'-phosphate
  modified_base 9: mod_base = OTHER; note = 2'-O-methyluridine-3'-phosphate
  modified_base 10: mod_base = OTHER; note = 2'-O-methyladenosine-3'-phosphate
  modified_base 11: mod_base = OTHER; note = 2'-O-methylcytidine-3'-phosphate
  modified_base 12: mod_base = OTHER; note = 2'-O-methyladenosine-3'-phosphate
  modified_base 13: mod_base = OTHER; note = 2'-O-methyladenosine-3'-phosphate
  modified_base 14: mod_base = OTHER; note = 2'-deoxy-2'-fluorocytidine-3'-phosphate
  modified_base 15: mod_base = OTHER; note = 2'-O-methyladenosine-3'-phosphate
  modified_base 16: mod_base = OTHER; note = 2'-deoxy-2'-fluoroguanosine-3'-phosphate
  modified_base 17: mod_base = OTHER; note = 2'-O-methyladenosine-3'-phosphate
  modified_base 18: mod_base = OTHER; note = 2'-O-methyladenosine-3'-phosphate
  modified_base 19: mod_base = OTHER; note = 2'-O-methyluridine-3'-phosphate
  modified_base 20: mod_base = OTHER; note = 2'-O-methylcytidine-3'-phosphate
  modified_base 21: mod_base = OTHER; note = 2'-O-methyluridine-3'-phosphorothioate
  modified_base 22: mod_base = OTHER; note = 2'-O-methylguanosine-3'-phosphorothioate
  modified_base 23: mod_base = OTHER; note = 2'-O-methyluridine
tgaaagcatacaacagaatctgt

SEQ ID NO: 13012 - RNA, 23 nt, synthetic construct
  source 1..23: mol_type = other RNA
  modified_base 1: mod_base = OTHER; note = 2'-O-methyluridine-3'-phosphorothioate 5'-(E)-Vinylphosphonate
  modified_base 2: mod_base = OTHER; note = 2'-deoxy-2'-fluoroadenosine-3'-phosphorothioate
  modified_base 3: mod_base = OTHER; note = 2'-O-methylguanosine-3'-phosphate
  modified_base 4: mod_base = OTHER; note = 2'-O-methyladenosine-3'-phosphate
  modified_base 5: mod_base = OTHER; note = 2'-O-methyladenosine-3'-phosphate
  modified_base 6: mod_base = OTHER; note = 2'-deoxy-2'-fluoroadenosine-3'-phosphate
  modified_base 7: mod_base = OTHER; note = 2'-O-methylguanosine-3'-phosphate
  modified_base 8: mod_base = OTHER; note = 2'-O-methylcytidine-3'-phosphate
  modified_base 9: mod_base = OTHER; note = 2'-O-methyladenosine-3'-phosphate
  modified_base 10: mod_base = OTHER; note = 2'-O-methyluridine-3'-phosphate
  modified_base 11: mod_base = OTHER; note = 2'-O-methyladenosine-3'-phosphate
  modified_base 12: mod_base = OTHER; note = 2'-O-methylcytidine-3'-phosphate
  modified_base 13: mod_base = OTHER; note = 2'-O-methyladenosine-3'-phosphate
  modified_base 14: mod_base = OTHER; note = 2'-deoxy-2'-fluoroadenosine-3'-phosphate
  modified_base 15: mod_base = OTHER; note = 2'-O-methylcytidine-3'-phosphate
  modified_base 16: mod_base = OTHER; note = 2'-deoxy-2'-fluoroadenosine-3'-phosphate
  modified_base 17: mod_base = OTHER; note = 2'-O-methylguanosine-3'-phosphate
  modified_base 18: mod_base = OTHER; note = 2'-O-methyladenosine-3'-phosphate
  modified_base 19: mod_base = OTHER; note = 2'-O-methyladenosine-3'-phosphate
  modified_base 20: mod_base = OTHER; note = 2'-O-methyluridine-3'-phosphate
  modified_base 21: mod_base = OTHER; note = 2'-O-methylcytidine-3'-phosphorothioate
  modified_base 22: mod_base = OTHER; note = 2'-O-methyluridine-3'-phosphorothioate
  modified_base 23: mod_base = OTHER; note = 2'-O-methylguanosine
tagaaagcatacaacagaatctg

SEQ ID NO: 13013 - RNA, 23 nt, synthetic construct
  source 1..23: mol_type = other RNA
  modified_base 1: mod_base = OTHER; note = 2'-O-methyluridine-3'-phosphorothioate 5'-(E)-Vinylphosphonate
  modified_base 2: mod_base = OTHER; note = 2'-deoxy-2'-fluoroadenosine-3'-phosphorothioate
  modified_base 3: mod_base = OTHER; note = 2'-O-methyluridine-3'-phosphate
  modified_base 4: mod_base = OTHER; note = 2'-O-methyluridine-3'-phosphate
  modified_base 5: mod_base = OTHER; note = 2'-O-methylcytidine-3'-phosphate
  modified_base 6: mod_base = OTHER; note = 2'-deoxy-2'-fluorouridine-3'-phosphate
  modified_base 7: mod_base = OTHER; note = 2'-O-methyladenosine-3'-phosphate
  modified_base 8: mod_base = OTHER; note = 2'-O-methylguanosine-3'-phosphate
  modified_base 9: mod_base = OTHER; note = 2'-O-methyladenosine-3'-phosphate
  modified_base 10: mod_base = OTHER; note = 2'-O-methyluridine-3'-phosphate
  modified_base 11: mod_base = OTHER; note = 2'-O-methylguanosine-3'-phosphate
  modified_base 12: mod_base = OTHER; note = 2'-O-methyluridine-3'-phosphate
  modified_base 13: mod_base = OTHER; note = 2'-O-methylguanosine-3'-phosphate
  modified_base 14: mod_base = OTHER; note = 2'-deoxy-2'-fluoroadenosine-3'-phosphate
  modified_base 15: mod_base = OTHER; note = 2'-O-methylcytidine-3'-phosphate
  modified_base 16: mod_base = OTHER; note = 2'-deoxy-2'-fluoroadenosine-3'-phosphate
  modified_base 17: mod_base = OTHER; note = 2'-O-methyluridine-3'-phosphate
  modified_base 18: mod_base = OTHER; note = 2'-O-methylguanosine-3'-phosphate
  modified_base 19: mod_base = OTHER; note = 2'-O-methylcytidine-3'-phosphate
  modified_base 20: mod_base = OTHER; note = 2'-O-methylcytidine-3'-phosphate
  modified_base 21: mod_base = OTHER; note = 2'-O-methyladenosine-3'-phosphorothioate
  modified_base 22: mod_base = OTHER; note = 2'-O-methyladenosine-3'-phosphorothioate
  modified_base 23: mod_base = OTHER; note = 2'-O-methyladenosine
tattctagatgtgacatgccaaa

SEQ ID NO: 13014 - RNA, 23 nt, synthetic construct
  source 1..23: mol_type = other RNA
  modified_base 1: mod_base = OTHER; note = 2'-O-methyluridine-3'-phosphorothioate 5'-(E)-Vinylphosphonate
  modified_base 2: mod_base = OTHER; note = 2'-deoxy-2'-fluoroadenosine-3'-phosphorothioate
  modified_base 3: mod_base = OTHER; note = 2'-O-methyladenosine-3'-phosphate
  modified_base 4: mod_base = OTHER; note = 2'-O-methyluridine-3'-phosphate
  modified_base 5: mod_base = OTHER; note = 2'-O-methyluridine-3'-phosphate
  modified_base 6: mod_base = OTHER; note = 2'-deoxy-2'-fluorocytidine-3'-phosphate
  modified_base 7: mod_base = OTHER; note = 2'-O-methyluridine-3'-phosphate
  modified_base 8: mod_base = OTHER; note = 2'-O-methyladenosine-3'-phosphate
  modified_base 9: mod_base = OTHER; note = 2'-O-methylguanosine-3'-phosphate
  modified_base 10: mod_base = OTHER; note = 2'-O-methyladenosine-3'-phosphate
  modified_base 11: mod_base = OTHER; note = 2'-O-methyluridine-3'-phosphate
  modified_base 12: mod_base = OTHER; note = 2'-O-methylguanosine-3'-phosphate
  modified_base 13: mod_base = OTHER; note = 2'-O-methyluridine-3'-phosphate
  modified_base 14: mod_base = OTHER; note = 2'-deoxy-2'-fluoroguanosine-3'-phosphate
  modified_base 15: mod_base = OTHER; note = 2'-O-methyladenosine-3'-phosphate
  modified_base 16: mod_base = OTHER; note = 2'-deoxy-2'-fluorocytidine-3'-phosphate
  modified_base 17: mod_base = OTHER; note = 2'-O-methyladenosine-3'-phosphate
  modified_base 18: mod_base = OTHER; note = 2'-O-methyluridine-3'-phosphate
  modified_base 19: mod_base = OTHER; note = 2'-O-methylguanosine-3'-phosphate
  modified_base 20: mod_base = OTHER; note = 2'-O-methylcytidine-3'-phosphate
  modified_base 21: mod_base = OTHER; note = 2'-O-methylcytidine-3'-phosphorothioate
  modified_base 22: mod_base = OTHER; note = 2'-O-methyladenosine-3'-phosphorothioate
  modified_base 23: mod_base = OTHER; note = 2'-O-methyladenosine
taattctagatgtgacatgccaa

SEQ ID NO: 13015 - RNA, 23 nt, synthetic construct
  source 1..23: mol_type = other RNA
  modified_base 1: mod_base = OTHER; note = 2'-O-methyluridine-3'-phosphorothioate 5'-(E)-Vinylphosphonate
  modified_base 2: mod_base = OTHER; note = 2'-deoxy-2'-fluoroguanosine-3'-phosphorothioate
  modified_base 3: mod_base = OTHER; note = 2'-O-methyladenosine-3'-phosphate
  modified_base 4: mod_base = OTHER; note = 2'-O-methyladenosine-3'-phosphate
  modified_base 5: mod_base = OTHER; note = 2'-O-methyluridine-3'-phosphate
  modified_base 6: mod_base = OTHER; note = 2'-deoxy-2'-fluorouridine-3'-phosphate
  modified_base 7: mod_base = OTHER; note = 2'-O-methylcytidine-3'-phosphate
  modified_base 8: mod_base = OTHER; note = 2'-O-methyluridine-3'-phosphate
  modified_base 9: mod_base = OTHER; note = 2'-O-methyladenosine-3'-phosphate
  modified_base 10: mod_base = OTHER; note = 2'-O-methylguanosine-3'-phosphate
  modified_base 11: mod_base = OTHER; note = 2'-O-methyladenosine-3'-phosphate
  modified_base 12: mod_base = OTHER; note = 2'-O-methyluridine-3'-phosphate
  modified_base 13: mod_base = OTHER; note = 2'-O-methylguanosine-3'-phosphate
  modified_base 14: mod_base = OTHER; note = 2'-deoxy-2'-fluorouridine-3'-phosphate
  modified_base 15: mod_base = OTHER; note = 2'-O-methylguanosine-3'-phosphate
  modified_base 16: mod_base = OTHER; note = 2'-deoxy-2'-fluoroadenosine-3'-phosphate
  modified_base 17: mod_base = OTHER; note = 2'-O-methylcytidine-3'-phosphate
  modified_base 18: mod_base = OTHER; note = 2'-O-methyladenosine-3'-phosphate
  modified_base 19: mod_base = OTHER; note = 2'-O-methyluridine-3'-phosphate
  modified_base 20: mod_base = OTHER; note = 2'-O-methylguanosine-3'-phosphate
  modified_base 21: mod_base = OTHER; note = 2'-O-methylcytidine-3'-phosphorothioate
  modified_base 22: mod_base = OTHER; note = 2'-O-methylcytidine-3'-phosphorothioate
  modified_base 23: mod_base = OTHER; note = 2'-O-methyladenosine
tgaattctagatgtgacatgcca

SEQ ID NO: 13016 - RNA, 23 nt, synthetic construct
  source 1..23: mol_type = other RNA
  modified_base 1: mod_base = OTHER; note = 2'-O-methyluridine-3'-phosphorothioate 5'-(E)-Vinylphosphonate
  modified_base 2: mod_base = OTHER; note = 2'-deoxy-2'-fluoroadenosine-3'-phosphorothioate
  modified_base 3: mod_base = OTHER; note = 2'-O-methylguanosine-3'-phosphate
  modified_base 4: mod_base = OTHER; note = 2'-O-methyladenosine-3'-phosphate
  modified_base 5: mod_base = OTHER; note = 2'-O-methyladenosine-3'-phosphate
  modified_base 6: mod_base = OTHER; note = 2'-deoxy-2'-fluorouridine-3'-phosphate
  modified_base 7: mod_base = OTHER; note = 2'-O-methyluridine-3'-phosphate
  modified_base 8: mod_base = OTHER; note = 2'-O-methylcytidine-3'-phosphate
  modified_base 9: mod_base = OTHER; note = 2'-O-methyluridine-3'-phosphate
  modified_base 10: mod_base = OTHER; note = 2'-O-methyladenosine-3'-phosphate
  modified_base 11: mod_base = OTHER; note = 2'-O-methylguanosine-3'-phosphate
  modified_base 12: mod_base = OTHER; note = 2'-O-methyladenosine-3'-phosphate
  modified_base 13: mod_base = OTHER; note = 2'-O-methyluridine-3'-phosphate
  modified_base 14: mod_base = OTHER; note = 2'-deoxy-2'-fluoroguanosine-3'-phosphate
  modified_base 15: mod_base = OTHER; note = 2'-O-methyluridine-3'-phosphate
  modified_base 16: mod_base = OTHER; note = 2'-deoxy-2'-fluoroguanosine-3'-phosphate
  modified_base 17: mod_base = OTHER; note = 2'-O-methyladenosine-3'-phosphate
  modified_base 18: mod_base = OTHER; note = 2'-O-methylcytidine-3'-phosphate
  modified_base 19: mod_base = OTHER; note = 2'-O-methyladenosine-3'-phosphate
  modified_base 20: mod_base = OTHER; note = 2'-O-methyluridine-3'-phosphate
  modified_base 21: mod_base = OTHER; note = 2'-O-methylguanosine-3'-phosphorothioate
  modified_base 22: mod_base = OTHER; note = 2'-O-methylcytidine-3'-phosphorothioate
  modified_base 23: mod_base = OTHER; note = 2'-O-methylcytidine
tagaattctagatgtgacatgcc

SEQ ID NO: 13017 - RNA, 23 nt, synthetic construct
  source 1..23: mol_type = other RNA
  modified_base 1: mod_base = OTHER; note = 2'-O-methyluridine-3'-phosphorothioate 5'-(E)-Vinylphosphonate
  modified_base 2: mod_base = OTHER; note = 2'-deoxy-2'-fluoroadenosine-3'-phosphorothioate
  modified_base 3: mod_base = OTHER; note = 2'-O-methyladenosine-3'-phosphate
  modified_base 4: mod_base = OTHER; note = 2'-O-methylguanosine-3'-phosphate
  modified_base 5: mod_base = OTHER; note = 2'-O-methyladenosine-3'-phosphate
  modified_base 6: mod_base = OTHER; note = 2'-deoxy-2'-fluoroadenosine-3'-phosphate
  modified_base 7: mod_base = OTHER; note = 2'-O-methyluridine-3'-phosphate
  modified_base 8: mod_base = OTHER; note = 2'-O-methyluridine-3'-phosphate
  modified_base 9: mod_base = OTHER; note = 2'-O-methylcytidine-3'-phosphate
  modified_base 10: mod_base = OTHER; note = 2'-O-methyluridine-3'-phosphate
  modified_base 11: mod_base = OTHER; note = 2'-O-methyladenosine-3'-phosphate
  modified_base 12: mod_base = OTHER; note = 2'-O-methylguanosine-3'-phosphate
  modified_base 13: mod_base = OTHER; note = 2'-O-methyladenosine-3'-phosphate
  modified_base 14: mod_base = OTHER; note = 2'-deoxy-2'-fluorouridine-3'-phosphate
  modified_base 15: mod_base = OTHER; note = 2'-O-methylguanosine-3'-phosphate
  modified_base 16: mod_base = OTHER; note = 2'-deoxy-2'-fluorouridine-3'-phosphate
  modified_base 17: mod_base = OTHER; note = 2'-O-methylguanosine-3'-phosphate
  modified_base 18: mod_base = OTHER; note = 2'-O-methyladenosine-3'-phosphate
  modified_base 19: mod_base = OTHER; note = 2'-O-methylcytidine-3'-phosphate
  modified_base 20: mod_base = OTHER; note = 2'-O-methyladenosine-3'-phosphate
  modified_base 21: mod_base = OTHER; note = 2'-O-methyluridine-3'-phosphorothioate
  modified_base 22: mod_base = OTHER; note = 2'-O-methylguanosine-3'-phosphorothioate
  modified_base 23: mod_base = OTHER; note = 2'-O-methylcytidine
taagaattctagatgtgacatgc

SEQ ID NO: 13018 - RNA, 23 nt, synthetic construct
  source 1..23: mol_type = other RNA
  modified_base 1: mod_base = OTHER; note = 2'-O-methyluridine-3'-phosphorothioate 5'-(E)-Vinylphosphonate
  modified_base 2: mod_base = OTHER; note = 2'-deoxy-2'-fluorouridine-3'-phosphorothioate
  modified_base 3: mod_base = OTHER; note = 2'-O-methyladenosine-3'-phosphate
  modified_base 4: mod_base = OTHER; note = 2'-O-methyladenosine-3'-phosphate
  modified_base 5: mod_base = OTHER; note = 2'-O-methylguanosine-3'-phosphate
  modified_base 6: mod_base = OTHER; note = 2'-deoxy-2'-fluoroadenosine-3'-phosphate
  modified_base 7: mod_base = OTHER; note = 2'-O-methyladenosine-3'-phosphate
  modified_base 8: mod_base = OTHER; note = 2'-O-methyluridine-3'-phosphate
  modified_base 9: mod_base = OTHER; note = 2'-O-methyluridine-3'-phosphate
  modified_base 10: mod_base = OTHER; note = 2'-O-methylcytidine-3'-phosphate
  modified_base 11: mod_base = OTHER; note = 2'-O-methyluridine-3'-phosphate
  modified_base 12: mod_base = OTHER; note = 2'-O-methyladenosine-3'-phosphate
  modified_base 13: mod_base = OTHER; note = 2'-O-methylguanosine-3'-phosphate
  modified_base 14: mod_base = OTHER; note = 2'-deoxy-2'-fluoroadenosine-3'-phosphate
  modified_base 15: mod_base = OTHER; note = 2'-O-methyluridine-3'-phosphate
  modified_base 16: mod_base = OTHER; note = 2'-deoxy-2'-fluoroguanosine-3'-phosphate
  modified_base 17: mod_base = OTHER; note = 2'-O-methyluridine-3'-phosphate
  modified_base 18: mod_base = OTHER; note = 2'-O-methylguanosine-3'-phosphate
  modified_base 19: mod_base = OTHER; note = 2'-O-methyladenosine-3'-phosphate
  modified_base 20: mod_base = OTHER; note = 2'-O-methylcytidine-3'-phosphate
  modified_base 21: mod_base = OTHER; note = 2'-O-methyladenosine-3'-phosphorothioate
  modified_base 22: mod_base = OTHER; note = 2'-O-methyluridine-3'-phosphorothioate
  modified_base 23: mod_base = OTHER; note = 2'-O-methylguanosine
ttaagaattctagatgtgacatg

SEQ ID NO: 13019 - RNA, 23 nt, synthetic construct
  source 1..23: mol_type = other RNA
  modified_base 1: mod_base = OTHER; note = 2'-O-methyluridine-3'-phosphorothioate 5'-(E)-Vinylphosphonate
  modified_base 2: mod_base = OTHER; note = 2'-deoxy-2'-fluorouridine-3'-phosphorothioate
  modified_base 3: mod_base = OTHER; note = 2'-O-methyluridine-3'-phosphate
  modified_base 4: mod_base = OTHER; note = 2'-O-methyladenosine-3'-phosphate
  modified_base 5: mod_base = OTHER; note = 2'-O-methyladenosine-3'-phosphate
  modified_base 6: mod_base = OTHER; note = 2'-deoxy-2'-fluoroguanosine-3'-phosphate
  modified_base 7: mod_base = OTHER; note = 2'-O-methyladenosine-3'-phosphate
  modified_base 8: mod_base = OTHER; note = 2'-O-methyladenosine-3'-phosphate
  modified_base 9: mod_base = OTHER; note = 2'-O-methyluridine-3'-phosphate
  modified_base 10: mod_base = OTHER; note = 2'-O-methyluridine-3'-phosphate
  modified_base 11: mod_base = OTHER; note = 2'-O-methylcytidine-3'-phosphate
  modified_base 12: mod_base = OTHER; note = 2'-O-methyluridine-3'-phosphate
  modified_base 13: mod_base = OTHER; note = 2'-O-methyladenosine-3'-phosphate
  modified_base 14: mod_base = OTHER; note = 2'-deoxy-2'-fluoroguanosine-3'-phosphate
  modified_base 15: mod_base = OTHER; note = 2'-O-methyladenosine-3'-phosphate
  modified_base 16: mod_base = OTHER; note = 2'-deoxy-2'-fluorouridine-3'-phosphate
  modified_base 17: mod_base = OTHER; note = 2'-O-methylguanosine-3'-phosphate
  modified_base 18: mod_base = OTHER; note = 2'-O-methyluridine-3'-phosphate
  modified_base 19: mod_base = OTHER; note = 2'-O-methylguanosine-3'-phosphate
  modified_base 20: mod_base = OTHER; note = 2'-O-methyladenosine-3'-phosphate
  modified_base 21: mod_base = OTHER; note = 2'-O-methylcytidine-3'-phosphorothioate
  modified_base 22: mod_base = OTHER; note = 2'-O-methyladenosine-3'-phosphorothioate
  modified_base 23: mod_base = OTHER; note = 2'-O-methyluridine
tttaagaattctagatgtgacat

SEQ ID NO: 13020 - RNA, 23 nt, synthetic construct
  source 1..23: mol_type = other RNA
  modified_base 1: mod_base = OTHER; note = 2'-O-methyluridine-3'-phosphorothioate 5'-(E)-Vinylphosphonate
  modified_base 2: mod_base = OTHER; note = 2'-deoxy-2'-fluoroadenosine-3'-phosphorothioate
  modified_base 3: mod_base = OTHER; note = 2'-O-methyluridine-3'-phosphate
  modified_base 4: mod_base = OTHER; note = 2'-O-methyluridine-3'-phosphate
  modified_base 5: mod_base = OTHER; note = 2'-O-methyladenosine-3'-phosphate
  modified_base 6: mod_base = OTHER; note = 2'-deoxy-2'-fluoroadenosine-3'-phosphate
  modified_base 7: mod_base = OTHER; note = 2'-O-methylguanosine-3'-phosphate
  modified_base 8: mod_base = OTHER; note = 2'-O-methyladenosine-3'-phosphate
  modified_base 9: mod_base = OTHER; note = 2'-O-methyladenosine-3'-phosphate
  modified_base 10: mod_base = OTHER; note = 2'-O-methyluridine-3'-phosphate
  modified_base 11: mod_base = OTHER; note = 2'-O-methyluridine-3'-phosphate
  modified_base 12: mod_base = OTHER; note = 2'-O-methylcytidine-3'-phosphate
  modified_base 13: mod_base = OTHER; note = 2'-O-methyluridine-3'-phosphate
  modified_base 14: mod_base = OTHER; note = 2'-deoxy-2'-fluoroadenosine-3'-phosphate
  modified_base 15: mod_base = OTHER; note = 2'-O-methylguanosine-3'-phosphate
  modified_base 16: mod_base = OTHER; note = 2'-deoxy-2'-fluoroadenosine-3'-phosphate
  modified_base 17: mod_base = OTHER; note = 2'-O-methyluridine-3'-phosphate
  modified_base 18: mod_base = OTHER; note = 2'-O-methylguanosine-3'-phosphate
  modified_base 19: mod_base = OTHER; note = 2'-O-methyluridine-3'-phosphate
  modified_base 20: mod_base = OTHER; note = 2'-O-methylguanosine-3'-phosphate
  modified_base 21: mod_base = OTHER; note = 2'-O-methyladenosine-3'-phosphorothioate
  modified_base 22: mod_base = OTHER; note = 2'-O-methylcytidine-3'-phosphorothioate
  modified_base 23: mod_base = OTHER; note = 2'-O-methyladenosine
tattaagaattctagatgtgaca

SEQ ID NO: 13021 - RNA, 23 nt, synthetic construct
  source 1..23: mol_type = other RNA
  modified_base 1: mod_base = OTHER; note = 2'-O-methyluridine-3'-phosphorothioate 5'-(E)-Vinylphosphonate
  modified_base 2: mod_base = OTHER; note = 2'-deoxy-2'-fluorouridine-3'-phosphorothioate
  modified_base 3: mod_base = OTHER; note = 2'-O-methyluridine-3'-phosphate
  modified_base 4: mod_base = OTHER; note = 2'-O-methylcytidine-3'-phosphate
  modified_base 5: mod_base = OTHER; note = 2'-O-methyladenosine-3'-phosphate
  modified_base 6: mod_base = OTHER; note = 2'-deoxy-2'-fluorocytidine-3'-phosphate
  modified_base 7: mod_base = OTHER; note = 2'-O-methyluridine-3'-phosphate
  modified_base 8: mod_base = OTHER; note = 2'-O-methyluridine-3'-phosphate
  modified_base 9: mod_base = OTHER; note = 2'-O-methyladenosine-3'-phosphate
  modified_base 10: mod_base = OTHER; note = 2'-O-methyladenosine-3'-phosphate
  modified_base 11: mod_base = OTHER; note = 2'-O-methylcytidine-3'-phosphate
  modified_base 12: mod_base = OTHER; note = 2'-O-methyluridine-3'-phosphate
  modified_base 13: mod_base = OTHER; note = 2'-O-methylcytidine-3'-phosphate
  modified_base 14: mod_base = OTHER; note = 2'-deoxy-2'-fluorouridine-3'-phosphate
  modified_base 15: mod_base = OTHER; note = 2'-O-methylcytidine-3'-phosphate
  modified_base 16: mod_base = OTHER; note = 2'-deoxy-2'-fluoroadenosine-3'-phosphate
  modified_base 17: mod_base = OTHER; note = 2'-O-methyladenosine-3'-phosphate
  modified_base 18: mod_base = OTHER; note = 2'-O-methylguanosine-3'-phosphate
  modified_base 19: mod_base = OTHER; note = 2'-O-methyluridine-3'-phosphate
  modified_base 20: mod_base = OTHER; note = 2'-O-methylcytidine-3'-phosphate
  modified_base 21: mod_base = OTHER; note = 2'-O-methyladenosine-3'-phosphorothioate
  modified_base 22: mod_base = OTHER; note = 2'-O-methylguanosine-3'-phosphorothioate
  modified_base 23: mod_base = OTHER; note = 2'-O-methyladenosine
tttcacttaactctcaagtcaga

SEQ ID NO: 13022 - RNA, 23 nt, synthetic construct
  source 1..23: mol_type = other RNA
  modified_base 1: mod_base = OTHER; note = 2'-O-methyluridine-3'-phosphorothioate 5'-(E)-Vinylphosphonate
  modified_base 2: mod_base = OTHER; note = 2'-deoxy-2'-fluoroadenosine-3'-phosphorothioate
  modified_base 3: mod_base = OTHER; note = 2'-O-methyluridine-3'-phosphate
  modified_base 4: mod_base = OTHER; note = 2'-O-methylguanosine-3'-phosphate
  modified_base 5: mod_base = OTHER; note = 2'-O-methyluridine-3'-phosphate
  modified_base 6: mod_base = OTHER; note = 2'-deoxy-2'-fluorouridine-3'-phosphate
  modified_base 7: mod_base = OTHER; note = 2'-O-methyluridine-3'-phosphate
  modified_base 8: mod_base = OTHER; note = 2'-O-methylcytidine-3'-phosphate
  modified_base 9: mod_base = OTHER; note = 2'-O-methyladenosine-3'-phosphate
  modified_base 10: mod_base = OTHER; note = 2'-O-methylcytidine-3'-phosphate
  modified_base 11: mod_base = OTHER; note = 2'-O-methyluridine-3'-phosphate
  modified_base 12: mod_base = OTHER; note = 2'-O-methyluridine-3'-phosphate
  modified_base 13: mod_base = OTHER; note = 2'-O-methyladenosine-3'-phosphate
  modified_base 14: mod_base = OTHER; note = 2'-deoxy-2'-fluoroadenosine-3'-phosphate
  modified_base 15: mod_base = OTHER; note = 2'-O-methylcytidine-3'-phosphate
  modified_base 16: mod_base = OTHER; note = 2'-deoxy-2'-fluorouridine-3'-phosphate
  modified_base 17: mod_base = OTHER; note = 2'-O-methylcytidine-3'-phosphate
  modified_base 18: mod_base = OTHER; note = 2'-O-methyluridine-3'-phosphate
  modified_base 19: mod_base = OTHER; note = 2'-O-methylcytidine-3'-phosphate
  modified_base 20: mod_base = OTHER; note = 2'-O-methyladenosine-3'-phosphate
  modified_base 21: mod_base = OTHER; note = 2'-O-methyladenosine-3'-phosphorothioate
  modified_base 22: mod_base = OTHER; note = 2'-O-methylguanosine-3'-phosphorothioate
  modified_base 23: mod_base = OTHER; note = 2'-O-methyluridine
tatgtttcacttaactctcaagt

SEQ ID NO: 13023 - RNA, 23 nt, synthetic construct
  source 1..23: mol_type = other RNA
  modified_base 1: mod_base = OTHER; note = 2'-O-methyluridine-3'-phosphorothioate 5'-(E)-Vinylphosphonate
  modified_base 2: mod_base = OTHER; note = 2'-deoxy-2'-fluoroadenosine-3'-phosphorothioate
  modified_base 3: mod_base = OTHER; note = 2'-O-methyladenosine-3'-phosphate
  modified_base 4: mod_base = OTHER; note = 2'-O-methylguanosine-3'-phosphate
  modified_base 5: mod_base = OTHER; note = 2'-O-methyladenosine-3'-phosphate
  modified_base 6: mod_base = OTHER; note = 2'-deoxy-2'-fluorouridine-3'-phosphate
  modified_base 7: mod_base = OTHER; note = 2'-O-methylguanosine-3'-phosphate
  modified_base 8: mod_base = OTHER; note = 2'-O-methyladenosine-3'-phosphate
  modified_base 9: mod_base = OTHER; note = 2'-O-methyladenosine-3'-phosphate
  modified_base 10: mod_base = OTHER; note = 2'-O-methyladenosine-3'-phosphate
  modified_base 11: mod_base = OTHER; note = 2'-O-methyladenosine-3'-phosphate
  modified_base 12: mod_base = OTHER; note = 2'-O-methylguanosine-3'-phosphate
  modified_base 13: mod_base = OTHER; note = 2'-O-methylcytidine-3'-phosphate
  modified_base 14: mod_base = OTHER; note = 2'-deoxy-2'-fluoroadenosine-3'-phosphate
  modified_base 15: mod_base = OTHER; note = 2'-O-methyladenosine-3'-phosphate
  modified_base 16: mod_base = OTHER; note = 2'-deoxy-2'-fluoroguanosine-3'-phosphate
  modified_base 17: mod_base = OTHER; note = 2'-O-methyluridine-3'-phosphate
  modified_base 18: mod_base = OTHER; note = 2'-O-methylguanosine-3'-phosphate
  modified_base 19: mod_base = OTHER; note = 2'-O-methylcytidine-3'-phosphate
  modified_base 20: mod_base = OTHER; note = 2'-O-methyluridine-3'-phosphate
  modified_base 21: mod_base = OTHER; note = 2'-O-methyladenosine-3'-phosphorothioate
  modified_base 22: mod_base = OTHER; note = 2'-O-methyluridine-3'-phosphorothioate
  modified_base 23: mod_base = OTHER; note = 2'-O-methylguanosine
taagatgaaaagcaagtgctatg

SEQ ID NO: 13024 - RNA, 23 nt, synthetic construct
  source 1..23: mol_type = other RNA
  modified_base 1: mod_base = OTHER; note = 2'-O-methyluridine-3'-phosphorothioate 5'-(E)-Vinylphosphonate
  modified_base 2: mod_base = OTHER; note = 2'-deoxy-2'-fluorocytidine-3'-phosphorothioate
  modified_base 3: mod_base = OTHER; note = 2'-O-methyladenosine-3'-phosphate
  modified_base 4: mod_base = OTHER; note = 2'-O-methyluridine-3'-phosphate
  modified_base 5: mod_base = OTHER; note = 2'-O-methylguanosine-3'-phosphate
  modified_base 6: mod_base = OTHER; note = 2'-deoxy-2'-fluoroguanosine-3'-phosphate
  modified_base 7: mod_base = OTHER; note = 2'-O-methyladenosine-3'-phosphate
  modified_base 8: mod_base = OTHER; note = 2'-O-methyladenosine-3'-phosphate
  modified_base 9: mod_base = OTHER; note = 2'-O-methyladenosine-3'-phosphate
  modified_base 10: mod_base = OTHER; note = 2'-O-methyluridine-3'-phosphate
  modified_base 11: mod_base = OTHER; note = 2'-O-methyluridine-3'-phosphate
  modified_base 12: mod_base = OTHER; note = 2'-O-methyluridine-3'-phosphate
  modified_base 13: mod_base = OTHER; note = 2'-O-methyladenosine-3'-phosphate
  modified_base 14: mod_base = OTHER; note = 2'-deoxy-2'-fluoroadenosine-3'-phosphate
  modified_base 15: mod_base = OTHER; note = 2'-O-methyladenosine-3'-phosphate
  modified_base 16: mod_base = OTHER; note = 2'-deoxy-2'-fluoroadenosine-3'-phosphate
  modified_base 17: mod_base = OTHER; note = 2'-O-methyluridine-3'-phosphate
  modified_base 18: mod_base = OTHER; note = 2'-O-methylguanosine-3'-phosphate
  modified_base 19: mod_base = OTHER; note = 2'-O-methylcytidine-3'-phosphate
  modified_base 20: mod_base = OTHER; note = 2'-O-methyladenosine-3'-phosphate
  modified_base 21: mod_base = OTHER; note = 2'-O-methyladenosine-3'-phosphorothioate
  modified_base 22: mod_base = OTHER; note = 2'-O-methyladenosine-3'-phosphorothioate
  modified_base 23: mod_base = OTHER; note = 2'-O-methylguanosine
tcatggaaatttaaaatgcaaag

SEQ ID NO: 13025 - RNA, 23 nt, synthetic construct
  source 1..23: mol_type = other RNA
  modified_base 1: mod_base = OTHER; note = 2'-O-methyluridine-3'-phosphorothioate 5'-(E)-Vinylphosphonate
  modified_base 2: mod_base = OTHER; note = 2'-deoxy-2'-fluorocytidine-3'-phosphorothioate
  modified_base 3: mod_base = OTHER; note = 2'-O-methyladenosine-3'-phosphate
  modified_base 4: mod_base = OTHER; note = 2'-O-methyladenosine-3'-phosphate
  modified_base 5: mod_base = OTHER; note = 2'-O-methyluridine-3'-phosphate
  modified_base 6: mod_base = OTHER; note = 2'-deoxy-2'-fluorocytidine-3'-phosphate
  modified_base 7: mod_base = OTHER; note = 2'-O-methyladenosine-3'-phosphate
  modified_base 8: mod_base = OTHER; note = 2'-O-methyluridine-3'-phosphate
  modified_base 9: mod_base = OTHER; note = 2'-O-methylguanosine-3'-phosphate
  modified_base 10: mod_base = OTHER; note = 2'-O-methylguanosine-3'-phosphate
  modified_base 11: mod_base = OTHER; note = 2'-O-methyladenosine-3'-phosphate
  modified_base 12: mod_base = OTHER; note = 2'-O-methyladenosine-3'-phosphate
  modified_base 13: mod_base = OTHER; note = 2'-O-methyladenosine-3'-phosphate
  modified_base 14: mod_base = OTHER; note = 2'-deoxy-2'-fluorouridine-3'-phosphate
  modified_base 15: mod_base = OTHER; note = 2'-O-methyluridine-3'-phosphate
  modified_base 16: mod_base = OTHER; note = 2'-deoxy-2'-fluorouridine-3'-phosphate
  modified_base 17: mod_base = OTHER; note = 2'-O-methyladenosine-3'-phosphate
  modified_base 18: mod_base = OTHER; note = 2'-O-methyladenosine-3'-phosphate
  modified_base 19: mod_base = OTHER; note = 2'-O-methyladenosine-3'-phosphate
  modified_base 20: mod_base = OTHER; note = 2'-O-methyladenosine-3'-phosphate
  modified_base 21: mod_base = OTHER; note = 2'-O-methyluridine-3'-phosphorothioate
  modified_base 22: mod_base = OTHER; note = 2'-O-methylguanosine-3'-phosphorothioate
  modified_base 23: mod_base = OTHER; note = 2'-O-methylcytidine
tcaatcatggaaatttaaaatgc

SEQ ID NO: 13026 - RNA, 23 nt, synthetic construct
  source 1..23: mol_type = other RNA
  modified_base 1: mod_base = OTHER; note = 2'-O-methyluridine-3'-phosphorothioate 5'-(E)-Vinylphosphonate
  modified_base 2: mod_base = OTHER; note = 2'-deoxy-2'-fluorouridine-3'-phosphorothioate
  modified_base 3: mod_base = OTHER; note = 2'-O-methyluridine-3'-phosphate
  modified_base 4: mod_base = OTHER; note = 2'-O-methyluridine-3'-phosphate
  modified_base 5: mod_base = OTHER; note = 2'-O-methyluridine-3'-phosphate
  modified_base 6: mod_base = OTHER; note = 2'-deoxy-2'-fluorouridine-3'-phosphate
  modified_base 7: mod_base = OTHER; note = 2'-O-methylcytidine-3'-phosphate
  modified_base 8: mod_base = OTHER; note = 2'-O-methyladenosine-3'-phosphate
  modified_base 9: mod_base = OTHER; note = 2'-O-methylguanosine-3'-phosphate
  modified_base 10: mod_base = OTHER; note = 2'-O-methyladenosine-3'-phosphate
  modified_base 11: mod_base = OTHER; note = 2'-O-methyluridine-3'-phosphate
  modified_base 12: mod_base = OTHER; note = 2'-O-methyladenosine-3'-phosphate
  modified_base 13: mod_base = OTHER; note = 2'-O-methylcytidine-3'-phosphate
  modified_base 14: mod_base = OTHER; note = 2'-deoxy-2'-fluorouridine-3'-phosphate
  modified_base 15: mod_base = OTHER; note = 2'-O-methylguanosine-3'-phosphate
  modified_base 16: mod_base = OTHER; note = 2'-deoxy-2'-fluorocytidine-3'-phosphate
  modified_base 17: mod_base = OTHER; note = 2'-O-methyladenosine-3'-phosphate
  modified_base 18: mod_base = OTHER; note = 2'-O-methyladenosine-3'-phosphate
  modified_base 19: mod_base = OTHER; note = 2'-O-methylcytidine-3'-phosphate
  modified_base 20: mod_base = OTHER; note = 2'-O-methylcytidine-3'-phosphate
  modified_base 21: mod_base = OTHER; note = 2'-O-methyladenosine-3'-phosphorothioate
  modified_base 22: mod_base = OTHER; note = 2'-O-methylguanosine-3'-phosphorothioate
  modified_base 23: mod_base = OTHER; note = 2'-O-methylguanosine
ttttttcagatactgcaaccagg

SEQ ID NO: 13027 - RNA, 23 nt, synthetic construct
  source 1..23: mol_type = other RNA
  modified_base 1: mod_base = OTHER; note = 2'-O-methyluridine-3'-phosphorothioate 5'-(E)-Vinylphosphonate
  modified_base 2: mod_base = OTHER; note = 2'-deoxy-2'-fluorouridine-3'-phosphorothioate
  modified_base 3: mod_base = OTHER; note = 2'-O-methyluridine-3'-phosphate
  modified_base 4: mod_base = OTHER; note = 2'-O-methyluridine-3'-phosphate
  modified_base 5: mod_base = OTHER; note = 2'-O-methyluridine-3'-phosphate
  modified_base 6: mod_base = OTHER; note = 2'-deoxy-2'-fluorouridine-3'-phosphate
  modified_base 7: mod_base = OTHER; note = 2'-O-methyluridine-3'-phosphate
  modified_base 8: mod_base = OTHER; note = 2'-O-methylcytidine-3'-phosphate
  modified_base 9: mod_base = OTHER; note = 2'-O-methyladenosine-3'-phosphate
  modified_base 10: mod_base = OTHER; note = 2'-O-methylguanosine-3'-phosphate
  modified_base 11: mod_base = OTHER; note = 2'-O-methyladenosine-3'-phosphate
  modified_base 12: mod_base = OTHER; note = 2'-O-methyluridine-3'-phosphate
  modified_base 13: mod_base = OTHER; note = 2'-O-methyladenosine-3'-phosphate
  modified_base 14: mod_base = OTHER; note = 2'-deoxy-2'-fluorocytidine-3'-phosphate
  modified_base 15: mod_base = OTHER; note = 2'-O-methyluridine-3'-phosphate
  modified_base 16: mod_base = OTHER; note = 2'-deoxy-2'-fluoroguanosine-3'-phosphate
  modified_base 17: mod_base = OTHER; note = 2'-O-methylcytidine-3'-phosphate
  modified_base 18: mod_base = OTHER; note = 2'-O-methyladenosine-3'-phosphate
  modified_base 19: mod_base = OTHER; note = 2'-O-methyladenosine-3'-phosphate
  modified_base 20: mod_base = OTHER; note = 2'-O-methylcytidine-3'-phosphate
  modified_base 21: mod_base = OTHER; note = 2'-O-methylcytidine-3'-phosphorothioate
  modified_base 22: mod_base = OTHER; note = 2'-O-methyladenosine-3'-phosphorothioate
  modified_base 23: mod_base = OTHER; note = 2'-O-methylguanosine
tttttttcagatactgcaaccag

SEQ ID NO: 13028 - RNA, 23 nt, synthetic construct
  source 1..23: mol_type = other RNA
  modified_base 1: mod_base = OTHER; note = 2'-O-methyluridine-3'-phosphorothioate 5'-(E)-Vinylphosphonate
  modified_base 2: mod_base = OTHER; note = 2'-deoxy-2'-fluoroadenosine-3'-phosphorothioate
  modified_base 3: mod_base = OTHER; note = 2'-O-methyluridine-3'-phosphate
  modified_base 4: mod_base = OTHER; note = 2'-O-methyluridine-3'-phosphate
  modified_base 5: mod_base = OTHER; note = 2'-O-methyluridine-3'-phosphate
  modified_base 6: mod_base = OTHER; note = 2'-deoxy-2'-fluorouridine-3'-phosphate
  modified_base 7: mod_base = OTHER; note = 2'-O-methyluridine-3'-phosphate
  modified_base 8: mod_base = OTHER; note = 2'-O-methyluridine-3'-phosphate
  modified_base 9: mod_base = OTHER; note = 2'-O-methylcytidine-3'-phosphate
  modified_base 10: mod_base = OTHER; note = 2'-O-methyladenosine-3'-phosphate
  modified_base 11: mod_base = OTHER; note = 2'-O-methylguanosine-3'-phosphate
  modified_base 12: mod_base = OTHER; note = 2'-O-methyladenosine-3'-phosphate
  modified_base 13: mod_base = OTHER; note = 2'-O-methyluridine-3'-phosphate
  modified_base 14: mod_base = OTHER; note = 2'-deoxy-2'-fluoroadenosine-3'-phosphate
  modified_base 15: mod_base = OTHER; note = 2'-O-methylcytidine-3'-phosphate
  modified_base 16: mod_base = OTHER; note = 2'-deoxy-2'-fluorouridine-3'-phosphate
  modified_base 17: mod_base = OTHER; note = 2'-O-methylguanosine-3'-phosphate
  modified_base 18: mod_base = OTHER; note = 2'-O-methylcytidine-3'-phosphate
  modified_base 19: mod_base = OTHER; note = 2'-O-methyladenosine-3'-phosphate
  modified_base 20: mod_base = OTHER; note = 2'-O-methyladenosine-3'-phosphate
  modified_base 21: mod_base = OTHER; note = 2'-O-methylcytidine-3'-phosphorothioate
  modified_base 22: mod_base = OTHER; note = 2'-O-methylcytidine-3'-phosphorothioate
  modified_base 23: mod_base = OTHER; note = 2'-O-methyladenosine
tattttttcagatactgcaacca

SEQ ID NO: 13029 - RNA, 23 nt, synthetic construct
  source 1..23: mol_type = other RNA
  modified_base 1: mod_base = OTHER; note = 2'-O-methyluridine-3'-phosphorothioate 5'-(E)-Vinylphosphonate
  modified_base 2: mod_base = OTHER; note = 2'-deoxy-2'-fluoroadenosine-3'-phosphorothioate
  modified_base 3: mod_base = OTHER; note = 2'-O-methyladenosine-3'-phosphate
  modified_base 4: mod_base = OTHER; note = 2'-O-methyluridine-3'-phosphate
  modified_base 5: mod_base = OTHER; note = 2'-O-methyluridine-3'-phosphate
  modified_base 6: mod_base = OTHER; note = 2'-deoxy-2'-fluorouridine-3'-phosphate
  modified_base 7: mod_base = OTHER; note = 2'-O-methyluridine-3'-phosphate
  modified_base 8: mod_base = OTHER; note = 2'-O-methyluridine-3'-phosphate
  modified_base 9: mod_base = OTHER; note = 2'-O-methyluridine-3'-phosphate
  modified_base 10: mod_base = OTHER; note = 2'-O-methylcytidine-3'-phosphate
  modified_base 11: mod_base = OTHER; note = 2'-O-methyladenosine-3'-phosphate
  modified_base 12: mod_base = OTHER; note = 2'-O-methylguanosine-3'-phosphate
  modified_base 13: mod_base = OTHER; note = 2'-O-methyladenosine-3'-phosphate
  modified_base 14: mod_base = OTHER; note = 2'-deoxy-2'-fluorouridine-3'-phosphate
  modified_base 15: mod_base = OTHER; note = 2'-O-methyladenosine-3'-phosphate
  modified_base 16: mod_base = OTHER; note = 2'-deoxy-2'-fluorocytidine-3'-phosphate
  modified_base 17: mod_base = OTHER; note = 2'-O-methyluridine-3'-phosphate
  modified_base 18: mod_base = OTHER; note = 2'-O-methylguanosine-3'-phosphate
  modified_base 19: mod_base = OTHER; note = 2'-O-methylcytidine-3'-phosphate
  modified_base 20: mod_base = OTHER; note = 2'-O-methyladenosine-3'-phosphate
  modified_base 21: mod_base = OTHER; note = 2'-O-methyladenosine-3'-phosphorothioate
  modified_base 22: mod_base = OTHER; note = 2'-O-methylcytidine-3'-phosphorothioate
  modified_base 23: mod_base = OTHER; note = 2'-O-methylcytidine
taattttttcagatactgcaacc

SEQ ID NO: 13030 - RNA, 23 nt, synthetic construct
  source 1..23: mol_type = other RNA
  modified_base 1: mod_base = OTHER; note = 2'-O-methyluridine-3'-phosphorothioate 5'-(E)-Vinylphosphonate
  modified_base 2: mod_base = OTHER; note = 2'-deoxy-2'-fluorouridine-3'-phosphorothioate
  modified_base 3: mod_base = OTHER; note = 2'-O-methyladenosine-3'-phosphate
  modified_base 4: mod_base = OTHER; note = 2'-O-methyladenosine-3'-phosphate
  modified_base 5: mod_base = OTHER; note = 2'-O-methyluridine-3'-phosphate
  modified_base 6: mod_base = OTHER; note = 2'-deoxy-2'-fluorouridine-3'-phosphate
  modified_base 7: mod_base = OTHER; note = 2'-O-methyluridine-3'-phosphate
  modified_base 8: mod_base = OTHER; note = 2'-O-methyluridine-3'-phosphate
  modified_base 9: mod_base = OTHER; note = 2'-O-methyluridine-3'-phosphate
  modified_base 10: mod_base = OTHER; note = 2'-O-methyluridine-3'-phosphate
  modified_base 11: mod_base = OTHER; note = 2'-O-methylcytidine-3'-phosphate
  modified_base 12: mod_base = OTHER; note = 2'-O-methyladenosine-3'-phosphate
  modified_base 13: mod_base = OTHER; note = 2'-O-methylguanosine-3'-phosphate
  modified_base 14: mod_base = OTHER; note = 2'-deoxy-2'-fluoroadenosine-3'-phosphate
  modified_base 15: mod_base = OTHER; note = 2'-O-methyluridine-3'-phosphate
  modified_base 16: mod_base = OTHER; note = 2'-deoxy-2'-fluoroadenosine-3'-phosphate
  modified_base 17: mod_base = OTHER; note = 2'-O-methylcytidine-3'-phosphate
  modified_base 18: mod_base = OTHER; note = 2'-O-methyluridine-3'-phosphate
  modified_base 19: mod_base = OTHER; note = 2'-O-methylguanosine-3'-phosphate
  modified_base 20: mod_base = OTHER; note = 2'-O-methylcytidine-3'-phosphate
  modified_base 21: mod_base = OTHER; note = 2'-O-methyladenosine-3'-phosphorothioate
  modified_base 22: mod_base = OTHER; note = 2'-O-methyladenosine-3'-phosphorothioate
  modified_base 23: mod_base = OTHER; note = 2'-O-methylcytidine
ttaattttttcagatactgcaac

SEQ ID NO: 13031 - RNA, 23 nt, synthetic construct
  source 1..23: mol_type = other RNA
  modified_base 1: mod_base = OTHER; note = 2'-O-methyluridine-3'-phosphorothioate 5'-(E)-Vinylphosphonate
  modified_base 2: mod_base = OTHER; note = 2'-deoxy-2'-fluoroguanosine-3'-phosphorothioate
  modified_base 3: mod_base = OTHER; note = 2'-O-methyladenosine-3'-phosphate
  modified_base 4: mod_base = OTHER; note = 2'-O-methyladenosine-3'-phosphate
  modified_base 5: mod_base = OTHER; note = 2'-O-methylcytidine-3'-phosphate
  modified_base 6: mod_base = OTHER; note = 2'-deoxy-2'-fluorouridine-3'-phosphate
  modified_base 7: mod_base = OTHER; note = 2'-O-methyluridine-3'-phosphate
  modified_base 8: mod_base = OTHER; note = 2'-O-methylcytidine-3'-phosphate
  modified_base 9: mod_base = OTHER; note = 2'-O-methyluridine-3'-phosphate
  modified_base 10: mod_base = OTHER; note = 2'-O-methyladenosine-3'-phosphate
  modified_base 11: mod_base = OTHER; note = 2'-O-methyladenosine-3'-phosphate
  modified_base 12: mod_base = OTHER; note = 2'-O-methylcytidine-3'-phosphate
  modified_base 13: mod_base = OTHER; note = 2'-O-methylcytidine-3'-phosphate
  modified_base 14: mod_base = OTHER; note = 2'-deoxy-2'-fluorouridine-3'-phosphate
  modified_base 15: mod_base = OTHER; note = 2'-O-methyladenosine-3'-phosphate
  modified_base 16: mod_base = OTHER; note = 2'-deoxy-2'-fluoroadenosine-3'-phosphate
  modified_base 17: mod_base = OTHER; note = 2'-O-methyluridine-3'-phosphate
  modified_base 18: mod_base = OTHER; note = 2'-O-methylguanosine-3'-phosphate
  modified_base 19: mod_base = OTHER; note = 2'-O-methyladenosine-3'-phosphate
  modified_base 20: mod_base = OTHER; note = 2'-O-methyladenosine-3'-phosphate
  modified_base 21: mod_base = OTHER; note = 2'-O-methyluridine-3'-phosphorothioate
  modified_base 22: mod_base = OTHER; note = 2'-O-methylcytidine-3'-phosphorothioate
  modified_base 23: mod_base = OTHER; note = 2'-O-methyluridine
tgaacttctaacctaatgaatct

SEQ ID NO: 13032 - RNA, 23 nt, synthetic construct
  source 1..23: mol_type = other RNA
  modified_base 1: mod_base = OTHER; note = 2'-O-methyluridine-3'-phosphorothioate 5'-(E)-Vinylphosphonate
  modified_base 2: mod_base = OTHER; note = 2'-deoxy-2'-fluoroadenosine-3'-phosphorothioate
  modified_base 3: mod_base = OTHER; note = 2'-O-methyladenosine-3'-phosphate
  modified_base 4: mod_base = OTHER; note = 2'-O-methyladenosine-3'-phosphate
  modified_base 5: mod_base = OTHER; note = 2'-O-methyluridine-3'-phosphate
  modified_base 6: mod_base = OTHER; note = 2'-deoxy-2'-fluorouridine-3'-phosphate
  modified_base 7: mod_base = OTHER; note = 2'-O-methyladenosine-3'-phosphate
  modified_base 8: mod_base = OTHER; note = 2'-O-methyluridine-3'-phosphate
  modified_base 9: mod_base = OTHER; note = 2'-O-methyluridine-3'-phosphate
  modified_base 10: mod_base = OTHER; note = 2'-O-methylcytidine-3'-phosphate
  modified_base 11: mod_base = OTHER; note = 2'-O-methyluridine-3'-phosphate
  modified_base 12: mod_base = OTHER; note = 2'-O-methylguanosine-3'-phosphate
  modified_base 13: mod_base = OTHER; note = 2'-O-methylguanosine-3'-phosphate
  modified_base 14: mod_base = OTHER; note = 2'-deoxy-2'-fluoroadenosine-3'-phosphate
  modified_base 15: mod_base = OTHER; note = 2'-O-methyladenosine-3'-phosphate
  modified_base 16: mod_base = OTHER; note = 2'-deoxy-2'-fluorocytidine-3'-phosphate
  modified_base 17: mod_base = OTHER; note = 2'-O-methyluridine-3'-phosphate
  modified_base 18: mod_base = OTHER; note = 2'-O-methyluridine-3'-phosphate
  modified_base 19: mod_base = OTHER; note = 2'-O-methylcytidine-3'-phosphate
  modified_base 20: mod_base = OTHER; note = 2'-O-methyluridine-3'-phosphate
  modified_base 21: mod_base = OTHER; note = 2'-O-methyladenosine-3'-phosphorothioate
  modified_base 22: mod_base = OTHER; note = 2'-O-methyladenosine-3'-phosphorothioate
  modified_base 23: mod_base = OTHER; note = 2'-O-methylcytidine
taaattattctggaacttctaac

SEQ ID NO: 13033 - RNA, 23 nt, synthetic construct
  source 1..23: mol_type = other RNA
  modified_base 1: mod_base = OTHER; note = 2'-O-methyluridine-3'-phosphorothioate 5'-(E)-Vinylphosphonate
  modified_base 2: mod_base = OTHER; note = 2'-deoxy-2'-fluoroguanosine-3'-phosphorothioate
  modified_base 3: mod_base = OTHER; note = 2'-O-methyluridine-3'-phosphate
  modified_base 4: mod_base = OTHER; note = 2'-O-methyladenosine-3'-phosphate
  modified_base 5: mod_base = OTHER; note = 2'-O-methyladenosine-3'-phosphate
  modified_base 6: mod_base = OTHER; note = 2'-deoxy-2'-fluorouridine-3'-phosphate
  modified_base 7: mod_base = OTHER; note = 2'-O-methyluridine-3'-phosphate
  modified_base 8: mod_base = OTHER; note = 2'-O-methylcytidine-3'-phosphate
  modified_base 9: mod_base = OTHER; note = 2'-O-methyluridine-3'-phosphate
  modified_base 10: mod_base = OTHER; note = 2'-O-methyladenosine-3'-phosphate
  modified_base 11: mod_base = OTHER; note = 2'-O-methylcytidine-3'-phosphate
  modified_base 12: mod_base = OTHER; note = 2'-O-methyladenosine-3'-phosphate
  modified_base 13: mod_base = OTHER; note = 2'-O-methyladenosine-3'-phosphate
  modified_base 14: mod_base = OTHER; note = 2'-deoxy-2'-fluorouridine-3'-phosphate
  modified_base 15: mod_base = OTHER; note = 2'-O-methyladenosine-3'-phosphate
  modified_base 16: mod_base = OTHER; note = 2'-deoxy-2'-fluoroguanosine-3'-phosphate
  modified_base 17: mod_base = OTHER; note = 2'-O-methyluridine-3'-phosphate
  modified_base 18: mod_base = OTHER; note = 2'-O-methyladenosine-3'-phosphate
  modified_base 19: mod_base = OTHER; note = 2'-O-methylguanosine-3'-phosphate
  modified_base 20: mod_base = OTHER; note = 2'-O-methylguanosine-3'-phosphate
  modified_base 21: mod_base = OTHER; note = 2'-O-methyluridine-3'-phosphorothioate
  modified_base 22: mod_base = OTHER; note = 2'-O-methylguanosine-3'-phosphorothioate
  modified_base 23: mod_base = OTHER; note = 2'-O-methyluridine
tgtaattctacaatagtaggtgt

SEQ ID NO: 13034 - RNA, 23 nt, synthetic construct
  source 1..23: mol_type = other RNA
  modified_base 1: mod_base = OTHER; note = 2'-O-methyluridine-3'-phosphorothioate 5'-(E)-Vinylphosphonate
  modified_base 2: mod_base = OTHER; note = 2'-deoxy-2'-fluoroadenosine-3'-phosphorothioate
  modified_base 3: mod_base = OTHER; note = 2'-O-methyluridine-3'-phosphate
  modified_base 4: mod_base = OTHER; note = 2'-O-methyladenosine-3'-phosphate
  modified_base 5: mod_base = OTHER; note = 2'-O-methylguanosine-3'-phosphate
  modified_base 6: mod_base = OTHER; note = 2'-deoxy-2'-fluoroguanosine-3'-phosphate
  modified_base 7: mod_base = OTHER; note = 2'-O-methyladenosine-3'-phosphate
  modified_base 8: mod_base = OTHER; note = 2'-O-methylguanosine-3'-phosphate
  modified_base 9: mod_base = OTHER; note = 2'-O-methyluridine-3'-phosphate
  modified_base 10: mod_base = OTHER; note = 2'-O-methyladenosine-3'-phosphate
  modified_base 11: mod_base = OTHER; note = 2'-O-methylguanosine-3'-phosphate
  modified_base 12: mod_base = OTHER; note = 2'-O-methyluridine-3'-phosphate
  modified_base 13: mod_base = OTHER; note = 2'-O-methyluridine-3'-phosphate
  modified_base 14: mod_base = OTHER; note = 2'-deoxy-2'-fluorouridine-3'-phosphate
  modified_base 15: mod_base = OTHER; note = 2'-O-methyluridine-3'-phosphate
  modified_base 16: mod_base = OTHER; note = 2'-deoxy-2'-fluoroguanosine-3'-phosphate
  modified_base 17: mod_base = OTHER; note = 2'-O-methyluridine-3'-phosphate
  modified_base 18: mod_base = OTHER; note = 2'-O-methyluridine-3'-phosphate
  modified_base 19: mod_base = OTHER; note = 2'-O-methyluridine-3'-phosphate
  modified_base 20: mod_base = OTHER; note = 2'-O-methyluridine-3'-phosphate
  modified_base 21: mod_base = OTHER; note = 2'-O-methylguanosine-3'-phosphorothioate
  modified_base 22: mod_base = OTHER; note = 2'-O-methyluridine-3'-phosphorothioate
  modified_base 23: mod_base = OTHER; note = 2'-O-methyluridine
tataggagtagttttgttttgtt

SEQ ID NO: 13035 - RNA, 23 nt, synthetic construct
  source 1..23: mol_type = other RNA
  modified_base 1: mod_base = OTHER; note = 2'-O-methyluridine-3'-phosphorothioate 5'-(E)-Vinylphosphonate
  modified_base 2: mod_base = OTHER; note = 2'-deoxy-2'-fluoroguanosine-3'-phosphorothioate
  modified_base 3: mod_base = OTHER; note = 2'-O-methylguanosine-3'-phosphate
  modified_base 4: mod_base = OTHER; note = 2'-O-methyladenosine-3'-phosphate
  modified_base 5: mod_base = OTHER; note = 2'-O-methylguanosine-3'-phosphate
  modified_base 6: mod_base = OTHER; note = 2'-deoxy-2'-fluorouridine-3'-phosphate
  modified_base 7: mod_base = OTHER; note = 2'-O-methyladenosine-3'-phosphate
  modified_base 8: mod_base = OTHER; note = 2'-O-methylguanosine-3'-phosphate
  modified_base 9: mod_base = OTHER; note = 2'-O-methyluridine-3'-phosphate
  modified_base 10: mod_base = OTHER; note = 2'-O-methyluridine-3'-phosphate
  modified_base 11: mod_base = OTHER; note = 2'-O-methyluridine-3'-phosphate
  modified_base 12: mod_base = OTHER; note = 2'-O-methyluridine-3'-phosphate
  modified_base 13: mod_base = OTHER; note = 2'-O-methylguanosine-3'-phosphate
  modified_base 14: mod_base = OTHER; note = 2'-deoxy-2'-fluorouridine-3'-phosphate
  modified_base 15: mod_base = OTHER; note = 2'-O-methyluridine-3'-phosphate
  modified_base 16: mod_base = OTHER; note = 2'-deoxy-2'-fluorouridine-3'-phosphate
  modified_base 17: mod_base = OTHER; note = 2'-O-methyluridine-3'-phosphate
  modified_base 18: mod_base = OTHER; note = 2'-O-methylguanosine-3'-phosphate
  modified_base 19: mod_base = OTHER; note = 2'-O-methyluridine-3'-phosphate
  modified_base 20: mod_base = OTHER; note = 2'-O-methyluridine-3'-phosphate
  modified_base 21: mod_base = OTHER; note = 2'-O-methyluridine-3'-phosphorothioate
  modified_base 22: mod_base = OTHER; note = 2'-O-methyluridine-3'-phosphorothioate
  modified_base 23: mod_base = OTHER; note = 2'-O-methyladenosine
tggagtagttttgttttgtttta

SEQ ID NO: 13036 - RNA, 23 nt, synthetic construct
  source 1..23: mol_type = other RNA
  modified_base 1: mod_base = OTHER; note = 2'-O-methyluridine-3'-phosphorothioate 5'-(E)-Vinylphosphonate
  modified_base 2: mod_base = OTHER; note = 2'-deoxy-2'-fluorouridine-3'-phosphorothioate
  modified_base 3: mod_base = OTHER; note = 2'-O-methyladenosine-3'-phosphate
  modified_base 4: mod_base = OTHER; note = 2'-O-methylguanosine-3'-phosphate
  modified_base 5: mod_base = OTHER; note = 2'-O-methylguanosine-3'-phosphate
  modified_base 6: mod_base = OTHER; note = 2'-deoxy-2'-fluoroadenosine-3'-phosphate
  modified_base 7: mod_base = OTHER; note = 2'-O-methylguanosine-3'-phosphate
  modified_base 8: mod_base = OTHER; note = 2'-O-methyluridine-3'-phosphate
  modified_base 9: mod_base = OTHER; note = 2'-O-methyladenosine-3'-phosphate
  modified_base 10: mod_base = OTHER; note = 2'-O-methylguanosine-3'-phosphate
  modified_base 11: mod_base = OTHER; note = 2'-O-methyluridine-3'-phosphate
  modified_base 12: mod_base = OTHER; note = 2'-O-methyluridine-3'-phosphate
  modified_base 13: mod_base = OTHER; note = 2'-O-methyluridine-3'-phosphate
  modified_base 14: mod_base = OTHER; note = 2'-deoxy-2'-fluorouridine-3'-phosphate
  modified_base 15: mod_base = OTHER; note = 2'-O-methylguanosine-3'-phosphate
  modified_base 16: mod_base = OTHER; note = 2'-deoxy-2'-fluorouridine-3'-phosphate
  modified_base 17: mod_base = OTHER; note = 2'-O-methyluridine-3'-phosphate
  modified_base 18: mod_base = OTHER; note = 2'-O-methyluridine-3'-phosphate
  modified_base 19: mod_base = OTHER; note = 2'-O-methyluridine-3'-phosphate
  modified_base 20: mod_base = OTHER; note = 2'-O-methylguanosine-3'-phosphate
  modified_base 21: mod_base = OTHER; note = 2'-O-methyluridine-3'-phosphorothioate
  modified_base 22: mod_base = OTHER; note = 2'-O-methyluridine-3'-phosphorothioate
  modified_base 23: mod_base = OTHER; note = 2'-O-methyluridine
ttaggagtagttttgttttgttt

SEQ ID NO: 13037 - RNA, 23 nt, synthetic construct
  source 1..23: mol_type = other RNA
  modified_base 1: mod_base = OTHER; note = 2'-O-methyluridine-3'-phosphorothioate 5'-(E)-Vinylphosphonate
  modified_base 2: mod_base = OTHER; note = 2'-deoxy-2'-fluoroadenosine-3'-phosphorothioate
  modified_base 3: mod_base = OTHER; note = 2'-O-methyladenosine-3'-phosphate
  modified_base 4: mod_base = OTHER; note = 2'-O-methyluridine-3'-phosphate
  modified_base 5: mod_base = OTHER; note = 2'-O-methyladenosine-3'-phosphate
  modified_base 6: mod_base = OTHER; note = 2'-deoxy-2'-fluoroguanosine-3'-phosphate
  modified_base 7: mod_base = OTHER; note = 2'-O-methylguanosine-3'-phosphate
  modified_base 8: mod_base = OTHER; note = 2'-O-methyladenosine-3'-phosphate
  modified_base 9: mod_base = OTHER; note = 2'-O-methylguanosine-3'-phosphate
  modified_base 10: mod_base = OTHER; note = 2'-O-methyluridine-3'-phosphate
  modified_base 11: mod_base = OTHER; note = 2'-O-methyladenosine-3'-phosphate
  modified_base 12: mod_base = OTHER; note = 2'-O-methylguanosine-3'-phosphate
  modified_base 13: mod_base = OTHER; note = 2'-O-methyluridine-3'-phosphate
  modified_base 14: mod_base = OTHER; note = 2'-deoxy-2'-fluorouridine-3'-phosphate
  modified_base 15: mod_base = OTHER; note = 2'-O-methyluridine-3'-phosphate
  modified_base 16: mod_base = OTHER; note = 2'-deoxy-2'-fluorouridine-3'-phosphate
  modified_base 17: mod_base = OTHER; note = 2'-O-methylguanosine-3'-phosphate
  modified_base 18: mod_base = OTHER; note = 2'-O-methyluridine-3'-phosphate
  modified_base 19: mod_base = OTHER; note = 2'-O-methyluridine-3'-phosphate
  modified_base 20: mod_base = OTHER; note = 2'-O-methyluridine-3'-phosphate
  modified_base 21: mod_base = OTHER; note = 2'-O-methyluridine-3'-phosphorothioate
  modified_base 22: mod_base = OTHER; note = 2'-O-methylguanosine-3'-phosphorothioate
  modified_base 23: mod_base = OTHER; note = 2'-O-methyluridine
taataggagtagttttgttttgt

SEQ ID NO: 13038 - RNA, 23 nt, synthetic construct
  source 1..23: mol_type = other RNA
  modified_base 1: mod_base = OTHER; note = 2'-O-methyluridine-3'-phosphorothioate 5'-(E)-Vinylphosphonate
  modified_base 2: mod_base = OTHER; note = 2'-deoxy-2'-fluoroadenosine-3'-phosphorothioate
  modified_base 3: mod_base = OTHER; note = 2'-O-methyladenosine-3'-phosphate
  modified_base 4: mod_base = OTHER; note = 2'-O-methyladenosine-3'-phosphate
  modified_base 5: mod_base = OTHER; note = 2'-O-methyluridine-3'-phosphate
  modified_base 6: mod_base = OTHER; note = 2'-deoxy-2'-fluoroadenosine-3'-phosphate
  modified_base 7: mod_base = OTHER; note = 2'-O-methylguanosine-3'-phosphate
  modified_base 8: mod_base = OTHER; note = 2'-O-methylguanosine-3'-phosphate
  modified_base 9: mod_base = OTHER; note = 2'-O-methyladenosine-3'-phosphate
  modified_base 10: mod_base = OTHER; note = 2'-O-methylguanosine-3'-phosphate
  modified_base 11: mod_base = OTHER; note = 2'-O-methyluridine-3'-phosphate
  modified_base 12: mod_base = OTHER; note = 2'-O-methyladenosine-3'-phosphate
  modified_base 13: mod_base = OTHER; note = 2'-O-methylguanosine-3'-phosphate
  modified_base 14: mod_base = OTHER; note = 2'-deoxy-2'-fluorouridine-3'-phosphate
  modified_base 15: mod_base = OTHER; note = 2'-O-methyluridine-3'-phosphate
  modified_base 16: mod_base = OTHER; note = 2'-deoxy-2'-fluorouridine-3'-phosphate
  modified_base 17: mod_base = OTHER; note = 2'-O-methyluridine-3'-phosphate
  modified_base 18: mod_base = OTHER; note = 2'-O-methylguanosine-3'-phosphate
  modified_base 19: mod_base = OTHER; note = 2'-O-methyluridine-3'-phosphate
  modified_base 20: mod_base = OTHER; note = 2'-O-methyluridine-3'-phosphate
  modified_base 21: mod_base = OTHER; note = 2'-O-methyluridine-3'-phosphorothioate
  modified_base 22: mod_base = OTHER; note = 2'-O-methyluridine-3'-phosphorothioate
  modified_base 23: mod_base = OTHER; note = 2'-O-methylguanosine
taaataggagtagttttgttttg

SEQ ID NO: 13039 - RNA, 23 nt, synthetic construct
  source 1..23: mol_type = other RNA
  modified_base 1: mod_base = OTHER; note = 2'-O-methyluridine-3'-phosphorothioate 5'-(E)-Vinylphosphonate
  modified_base 2: mod_base = OTHER; note = 2'-deoxy-2'-fluoroguanosine-3'-phosphorothioate
  modified_base 3: mod_base = OTHER; note = 2'-O-methyladenosine-3'-phosphate
  modified_base 4: mod_base = OTHER; note = 2'-O-methyladenosine-3'-phosphate
  modified_base 5: mod_base = OTHER; note = 2'-O-methyladenosine-3'-phosphate
  modified_base 6: mod_base = OTHER; note = 2'-deoxy-2'-fluoroadenosine-3'-phosphate
  modified_base 7: mod_base = OTHER; note = 2'-O-methyluridine-3'-phosphate
  modified_base 8: mod_base = OTHER; note = 2'-O-methyladenosine-3'-phosphate
  modified_base 9: mod_base = OTHER; note = 2'-O-methylguanosine-3'-phosphate
  modified_base 10: mod_base = OTHER; note = 2'-O-methylguanosine-3'-phosphate
  modified_base 11: mod_base = OTHER; note = 2'-O-methyladenosine-3'-phosphate
  modified_base 12: mod_base = OTHER; note = 2'-O-methylguanosine-3'-phosphate
  modified_base 13: mod_base = OTHER; note = 2'-O-methyluridine-3'-phosphate
  modified_base 14: mod_base = OTHER; note = 2'-deoxy-2'-fluoroadenosine-3'-phosphate
  modified_base 15: mod_base = OTHER; note = 2'-O-methylguanosine-3'-phosphate
  modified_base 16: mod_base = OTHER; note = 2'-deoxy-2'-fluorouridine-3'-phosphate
  modified_base 17: mod_base = OTHER; note = 2'-O-methyluridine-3'-phosphate
  modified_base 18: mod_base = OTHER; note = 2'-O-methyluridine-3'-phosphate
  modified_base 19: mod_base = OTHER; note = 2'-O-methyluridine-3'-phosphate
  modified_base 20: mod_base = OTHER; note = 2'-O-methylguanosine-3'-phosphate
  modified_base 21: mod_base = OTHER; note = 2'-O-methyluridine-3'-phosphorothioate
  modified_base 22: mod_base = OTHER; note = 2'-O-methyluridine-3'-phosphorothioate
  modified_base 23: mod_base = OTHER; note = 2'-O-methyluridine
tgaaaataggagtagttttgttt

SEQ ID NO: 13040 - RNA, 23 nt, synthetic construct
  source 1..23: mol_type = other RNA
  modified_base 1: mod_base = OTHER; note = 2'-O-methyluridine-3'-phosphorothioate 5'-(E)-Vinylphosphonate
  modified_base 2: mod_base = OTHER; note = 2'-deoxy-2'-fluoroguanosine-3'-phosphorothioate
  modified_base 3: mod_base = OTHER; note = 2'-O-methylguanosine-3'-phosphate
  modified_base 4: mod_base = OTHER; note = 2'-O-methyladenosine-3'-phosphate
  modified_base 5: mod_base = OTHER; note = 2'-O-methyladenosine-3'-phosphate
  modified_base 6: mod_base = OTHER; note = 2'-deoxy-2'-fluoroadenosine-3'-phosphate
  modified_base 7: mod_base = OTHER; note = 2'-O-methyladenosine-3'-phosphate
  modified_base 8: mod_base = OTHER; note = 2'-O-methyluridine-3'-phosphate
  modified_base 9: mod_base = OTHER; note = 2'-O-methyladenosine-3'-phosphate
  modified_base 10: mod_base = OTHER; note = 2'-O-methylguanosine-3'-phosphate
  modified_base 11: mod_base = OTHER; note = 2'-O-methylguanosine-3'-phosphate
  modified_base 12: mod_base = OTHER; note = 2'-O-methyladenosine-3'-phosphate
  modified_base 13: mod_base = OTHER; note = 2'-O-methylguanosine-3'-phosphate
  modified_base 14: mod_base = OTHER; note = 2'-deoxy-2'-fluorouridine-3'-phosphate
  modified_base 15: mod_base = OTHER; note = 2'-O-methyladenosine-3'-phosphate
  modified_base 16: mod_base = OTHER; note = 2'-deoxy-2'-fluoroguanosine-3'-phosphate
  modified_base 17: mod_base = OTHER; note = 2'-O-methyluridine-3'-phosphate
  modified_base 18: mod_base = OTHER; note = 2'-O-methyluridine-3'-phosphate
  modified_base 19: mod_base = OTHER; note = 2'-O-methyluridine-3'-phosphate
  modified_base 20: mod_base = OTHER; note = 2'-O-methyluridine-3'-phosphate
  modified_base 21: mod_base = OTHER; note = 2'-O-methylguanosine-3'-phosphorothioate
  modified_base 22: mod_base = OTHER; note = 2'-O-methyluridine-3'-phosphorothioate
  modified_base 23: mod_base = OTHER; note = 2'-O-methyluridine
tggaaaataggagtagttttgtt

SEQ ID NO: 13041 - RNA, 23 nt, synthetic construct
  source 1..23: mol_type = other RNA
  modified_base 1: mod_base = OTHER; note = 2'-O-methyluridine-3'-phosphorothioate 5'-(E)-Vinylphosphonate
  modified_base 2: mod_base = OTHER; note = 2'-deoxy-2'-fluoroadenosine-3'-phosphorothioate
  modified_base 3: mod_base = OTHER; note = 2'-O-methylguanosine-3'-phosphate
  modified_base 4: mod_base = OTHER; note = 2'-O-methylguanosine-3'-phosphate
  modified_base 5: mod_base = OTHER; note = 2'-O-methyladenosine-3'-phosphate
  modified_base 6: mod_base = OTHER; note = 2'-deoxy-2'-fluoroadenosine-3'-phosphate
  modified_base 7: mod_base = OTHER; note = 2'-O-methyladenosine-3'-phosphate
  modified_base 8: mod_base = OTHER; note = 2'-O-methyladenosine-3'-phosphate
  modified_base 9: mod_base = OTHER; note = 2'-O-methyluridine-3'-phosphate
  modified_base 10: mod_base = OTHER; note = 2'-O-methyladenosine-3'-phosphate
  modified_base 11: mod_base = OTHER; note = 2'-O-methylguanosine-3'-phosphate
  modified_base 12: mod_base = OTHER; note = 2'-O-methylguanosine-3'-phosphate
  modified_base 13: mod_base = OTHER; note = 2'-O-methyladenosine-3'-phosphate
  modified_base 14: mod_base = OTHER; note = 2'-deoxy-2'-fluoroguanosine-3'-phosphate
  modified_base 15: mod_base = OTHER; note = 2'-O-methyluridine-3'-phosphate
  modified_base 16: mod_base = OTHER; note = 2'-deoxy-2'-fluoroadenosine-3'-phosphate
  modified_base 17: mod_base = OTHER; note = 2'-O-methylguanosine-3'-phosphate
  modified_base 18: mod_base = OTHER; note = 2'-O-methyluridine-3'-phosphate
  modified_base 19: mod_base = OTHER; note = 2'-O-methyluridine-3'-phosphate
  modified_base 20: mod_base = OTHER; note = 2'-O-methyluridine-3'-phosphate
  modified_base 21: mod_base = OTHER; note = 2'-O-methyluridine-3'-phosphorothioate
  modified_base 22: mod_base = OTHER; note = 2'-O-methylguanosine-3'-phosphorothioate
  modified_base 23: mod_base = OTHER; note = 2'-O-methyluridine
taggaaaataggagtagttttgt

SEQ ID NO: 13042 - RNA, 23 nt, synthetic construct
  source 1..23: mol_type = other RNA
  modified_base 1: mod_base = OTHER; note = 2'-O-methyluridine-3'-phosphorothioate 5'-(E)-Vinylphosphonate
  modified_base 2: mod_base = OTHER; note = 2'-deoxy-2'-fluorouridine-3'-phosphorothioate
  modified_base 3: mod_base = OTHER; note = 2'-O-methylguanosine-3'-phosphate
  modified_base 4: mod_base = OTHER; note = 2'-O-methylguanosine-3'-phosphate
  modified_base 5: mod_base = OTHER; note = 2'-O-methylcytidine-3'-phosphate
  modified_base 6: mod_base = OTHER; note = 2'-deoxy-2'-fluoroadenosine-3'-phosphate
  modified_base 7: mod_base = OTHER; note = 2'-O-methyladenosine-3'-phosphate
  modified_base 8: mod_base = OTHER; note = 2'-O-methyladenosine-3'-phosphate
  modified_base 9: mod_base = OTHER; note = 2'-O-methyladenosine-3'-phosphate
  modified_base 10: mod_base = OTHER; note = 2'-O-methyluridine-3'-phosphate
  modified_base 11: mod_base = OTHER; note = 2'-O-methyluridine-3'-phosphate
  modified_base 12: mod_base = OTHER; note = 2'-O-methylcytidine-3'-phosphate
  modified_base 13: mod_base = OTHER; note = 2'-O-methylcytidine-3'-phosphate
  modified_base 14: mod_base = OTHER; note = 2'-deoxy-2'-fluoroadenosine-3'-phosphate
  modified_base 15: mod_base = OTHER; note = 2'-O-methylguanosine-3'-phosphate
  modified_base 16: mod_base = OTHER; note = 2'-deoxy-2'-fluoroguanosine-3'-phosphate
  modified_base 17: mod_base = OTHER; note = 2'-O-methyladenosine-3'-phosphate
  modified_base 18: mod_base = OTHER; note = 2'-O-methyladenosine-3'-phosphate
  modified_base 19: mod_base = OTHER; note = 2'-O-methyladenosine-3'-phosphate
  modified_base 20: mod_base = OTHER; note = 2'-O-methyladenosine-3'-phosphate
  modified_base 21: mod_base = OTHER; note = 2'-O-methyluridine-3'-phosphorothioate
  modified_base 22: mod_base = OTHER; note = 2'-O-methyladenosine-3'-phosphorothioate
  modified_base 23: mod_base = OTHER; note = 2'-O-methylguanosine
ttggcaaaattccaggaaaatag

SEQ ID NO: 13043 - RNA, 23 nt, synthetic construct
  source 1..23: mol_type = other RNA
  modified_base 1: mod_base = OTHER; note = 2'-O-methyluridine-3'-phosphorothioate 5'-(E)-Vinylphosphonate
  modified_base 2: mod_base = OTHER; note = 2'-deoxy-2'-fluorouridine-3'-phosphorothioate
  modified_base 3: mod_base = OTHER; note = 2'-O-methyluridine-3'-phosphate
  modified_base 4: mod_base = OTHER; note = 2'-O-methyluridine-3'-phosphate
  modified_base 5: mod_base = OTHER; note = 2'-O-methylguanosine-3'-phosphate
  modified_base 6: mod_base = OTHER; note = 2'-deoxy-2'-fluorouridine-3'-phosphate
  modified_base 7: mod_base = OTHER; note = 2'-O-methyladenosine-3'-phosphate
  modified_base 8: mod_base = OTHER; note = 2'-O-methyluridine-3'-phosphate
  modified_base 9: mod_base = OTHER; note = 2'-O-methyladenosine-3'-phosphate
  modified_base 10: mod_base = OTHER; note = 2'-O-methyladenosine-3'-phosphate
  modified_base 11: mod_base = OTHER; note = 2'-O-methyluridine-3'-phosphate
  modified_base 12: mod_base = OTHER; note = 2'-O-methylguanosine-3'-phosphate
  modified_base 13: mod_base = OTHER; note = 2'-O-methylguanosine-3'-phosphate
  modified_base 14: mod_base = OTHER; note = 2'-deoxy-2'-fluorocytidine-3'-phosphate
  modified_base 15: mod_base = OTHER; note = 2'-O-methyladenosine-3'-phosphate
  modified_base 16: mod_base = OTHER; note = 2'-deoxy-2'-fluoroadenosine-3'-phosphate
  modified_base 17: mod_base = OTHER; note = 2'-O-methyladenosine-3'-phosphate
  modified_base 18: mod_base = OTHER; note = 2'-O-methylcytidine-3'-phosphate
  modified_base 19: mod_base = OTHER; note = 2'-O-methyladenosine-3'-phosphate
  modified_base 20: mod_base = OTHER; note = 2'-O-methyluridine-3'-phosphate
  modified_base 21: mod_base = OTHER; note = 2'-O-methylcytidine-3'-phosphorothioate
  modified_base 22: mod_base = OTHER; note = 2'-O-methyladenosine-3'-phosphorothioate
  modified_base 23: mod_base = OTHER; note = 2'-O-methylguanosine
ttttgtataatggcaaacatcag

SEQ ID NO: 13044 - RNA, 23 nt, synthetic construct
  source 1..23: mol_type = other RNA
  modified_base 1: mod_base = OTHER; note = 2'-O-methyluridine-3'-phosphorothioate 5'-(E)-Vinylphosphonate
  modified_base 2: mod_base = OTHER; note = 2'-deoxy-2'-fluoroadenosine-3'-phosphorothioate
  modified_base 3: mod_base = OTHER; note = 2'-O-methylguanosine-3'-phosphate
  modified_base 4: mod_base = OTHER; note = 2'-O-methylcytidine-3'-phosphate
  modified_base 5: mod_base = OTHER; note = 2'-O-methyladenosine-3'-phosphate
  modified_base 6: mod_base = OTHER; note = 2'-deoxy-2'-fluoroadenosine-3'-phosphate
  modified_base 7: mod_base = OTHER; note = 2'-O-methyluridine-3'-phosphate
  modified_base 8: mod_base = OTHER; note = 2'-O-methyluridine-3'-phosphate
  modified_base 9: mod_base = OTHER; note = 2'-O-methyluridine-3'-phosphate
  modified_base 10: mod_base = OTHER; note = 2'-O-methyluridine-3'-phosphate
  modified_base 11: mod_base = OTHER; note = 2'-O-methyladenosine-3'-phosphate
  modified_base 12: mod_base = OTHER; note = 2'-O-methyladenosine-3'-phosphate
  modified_base 13: mod_base = OTHER; note = 2'-O-methylguanosine-3'-phosphate
  modified_base 14: mod_base = OTHER; note = 2'-deoxy-2'-fluorouridine-3'-phosphate
  modified_base 15: mod_base = OTHER; note = 2'-O-methyluridine-3'-phosphate
  modified_base 16: mod_base = OTHER; note = 2'-deoxy-2'-fluoroguanosine-3'-phosphate
  modified_base 17: mod_base = OTHER; note = 2'-O-methyluridine-3'-phosphate
  modified_base 18: mod_base = OTHER; note = 2'-O-methyluridine-3'-phosphate
  modified_base 19: mod_base = OTHER; note = 2'-O-methyluridine-3'-phosphate
  modified_base 20: mod_base = OTHER; note = 2'-O-methyladenosine-3'-phosphate
  modified_base 21: mod_base = OTHER; note = 2'-O-methylcytidine-3'-phosphorothioate
  modified_base 22: mod_base = OTHER; note = 2'-O-methyluridine-3'-phosphorothioate
  modified_base 23: mod_base = OTHER; note = 2'-O-methylcytidine
tagcaattttaagttgtttactc

SEQ ID NO: 13045 - RNA, 23 nt, synthetic construct
  source 1..23: mol_type = other RNA
  modified_base 1: mod_base = OTHER; note = 2'-O-methyluridine-3'-phosphorothioate 5'-(E)-Vinylphosphonate
  modified_base 2: mod_base = OTHER; note = 2'-deoxy-2'-fluoroadenosine-3'-phosphorothioate
  modified_base 3: mod_base = OTHER; note = 2'-O-methylguanosine-3'-phosphate
  modified_base 4: mod_base = OTHER; note = 2'-O-methyluridine-3'-phosphate
  modified_base 5: mod_base = OTHER; note = 2'-O-methyluridine-3'-phosphate
  modified_base 6: mod_base = OTHER; note = 2'-deoxy-2'-fluoroguanosine-3'-phosphate
  modified_base 7: mod_base = OTHER; note = 2'-O-methyluridine-3'-phosphate
  modified_base 8: mod_base = OTHER; note = 2'-O-methyluridine-3'-phosphate
  modified_base 9: mod_base = OTHER; note = 2'-O-methyluridine-3'-phosphate
  modified_base 10: mod_base = OTHER; note = 2'-O-methyladenosine-3'-phosphate
  modified_base 11: mod_base = OTHER; note = 2'-O-methylcytidine-3'-phosphate
  modified_base 12: mod_base = OTHER; note = 2'-O-methyluridine-3'-phosphate
  modified_base 13: mod_base = OTHER; note = 2'-O-methylcytidine-3'-phosphate
  modified_base 14: mod_base = OTHER; note = 2'-deoxy-2'-fluoroadenosine-3'-phosphate
  modified_base 15: mod_base = OTHER; note = 2'-O-methyladenosine-3'-phosphate
  modified_base 16: mod_base = OTHER; note = 2'-deoxy-2'-fluoroadenosine-3'-phosphate
  modified_base 17: mod_base = OTHER; note = 2'-O-methylcytidine-3'-phosphate
  modified_base 18: mod_base = OTHER; note = 2'-O-methyluridine-3'-phosphate
  modified_base 19: mod_base = OTHER; note = 2'-O-methyluridine-3'-phosphate
  modified_base 20: mod_base = OTHER; note = 2'-O-methyluridine-3'-phosphate
  modified_base 21: mod_base = OTHER; note = 2'-O-methylguanosine-3'-phosphorothioate
  modified_base 22: mod_base = OTHER; note = 2'-O-methyluridine-3'-phosphorothioate
  modified_base 23: mod_base = OTHER; note = 2'-O-methyladenosine
tagttgtttactcaaactttgta

SEQ ID NO: 13046 - RNA, 23 nt, synthetic construct
  source 1..23: mol_type = other RNA
  modified_base 1: mod_base = OTHER; note = 2'-O-methyluridine-3'-phosphorothioate 5'-(E)-Vinylphosphonate
  modified_base 2: mod_base = OTHER; note = 2'-deoxy-2'-fluoroadenosine-3'-phosphorothioate
  modified_base 3: mod_base = OTHER; note = 2'-O-methyladenosine-3'-phosphate
  modified_base 4: mod_base = OTHER; note = 2'-O-methylguanosine-3'-phosphate
  modified_base 5: mod_base = OTHER; note = 2'-O-methyluridine-3'-phosphate
  modified_base 6: mod_base = OTHER; note = 2'-deoxy-2'-fluorouridine-3'-phosphate
  modified_base 7: mod_base = OTHER; note = 2'-O-methylguanosine-3'-phosphate
  modified_base 8: mod_base = OTHER; note = 2'-O-methyluridine-3'-phosphate
  modified_base 9: mod_base = OTHER; note = 2'-O-methyluridine-3'-phosphate
  modified_base 10: mod_base = OTHER; note = 2'-O-methyluridine-3'-phosphate
  modified_base 11: mod_base = OTHER; note = 2'-O-methyladenosine-3'-phosphate
  modified_base 12: mod_base = OTHER; note = 2'-O-methylcytidine-3'-phosphate
  modified_base 13: mod_base = OTHER; note = 2'-O-methyluridine-3'-phosphate
  modified_base 14: mod_base = OTHER; note = 2'-deoxy-2'-fluorocytidine-3'-phosphate
  modified_base 15: mod_base = OTHER; note = 2'-O-methyladenosine-3'-phosphate
  modified_base 16: mod_base = OTHER; note = 2'-deoxy-2'-fluoroadenosine-3'-phosphate
  modified_base 17: mod_base = OTHER; note = 2'-O-methyladenosine-3'-phosphate
  modified_base 18: mod_base = OTHER; note = 2'-O-methylcytidine-3'-phosphate
  modified_base 19: mod_base = OTHER; note = 2'-O-methyluridine-3'-phosphate
  modified_base 20: mod_base = OTHER; note = 2'-O-methyluridine-3'-phosphate
  modified_base 21: mod_base = OTHER; note = 2'-O-methyluridine-3'-phosphorothioate
  modified_base 22: mod_base = OTHER; note = 2'-O-methylguanosine-3'-phosphorothioate
  modified_base 23: mod_base = OTHER; note = 2'-O-methyluridine
taagttgtttactcaaactttgt

SEQ ID NO: 13047 - RNA, 23 nt, synthetic construct
  source 1..23: mol_type = other RNA
  modified_base 1: mod_base = OTHER; note = 2'-O-methyluridine-3'-phosphorothioate 5'-(E)-Vinylphosphonate
  modified_base 2: mod_base = OTHER; note = 2'-deoxy-2'-fluorouridine-3'-phosphorothioate
  modified_base 3: mod_base = OTHER; note = 2'-O-methyladenosine-3'-phosphate
  modified_base 4: mod_base = OTHER; note = 2'-O-methyladenosine-3'-phosphate
  modified_base 5: mod_base = OTHER; note = 2'-O-methylguanosine-3'-phosphate
  modified_base 6: mod_base = OTHER; note = 2'-deoxy-2'-fluorouridine-3'-phosphate
  modified_base 7: mod_base = OTHER; note = 2'-O-methyluridine-3'-phosphate
  modified_base 8: mod_base = OTHER; note = 2'-O-methylguanosine-3'-phosphate
  modified_base 9: mod_base = OTHER; note = 2'-O-methyluridine-3'-phosphate
  modified_base 10: mod_base = OTHER; note = 2'-O-methyluridine-3'-phosphate
  modified_base 11: mod_base = OTHER; note = 2'-O-methyluridine-3'-phosphate
  modified_base 12: mod_base = OTHER; note = 2'-O-methyladenosine-3'-phosphate
  modified_base 13: mod_base = OTHER; note = 2'-O-methylcytidine-3'-phosphate
  modified_base 14: mod_base = OTHER; note = 2'-deoxy-2'-fluorouridine-3'-phosphate
  modified_base 15: mod_base = OTHER; note = 2'-O-methylcytidine-3'-phosphate
  modified_base 16: mod_base = OTHER; note = 2'-deoxy-2'-fluoroadenosine-3'-phosphate
  modified_base 17: mod_base = OTHER; note = 2'-O-methyladenosine-3'-phosphate
  modified_base 18: mod_base = OTHER; note = 2'-O-methyladenosine-3'-phosphate
  modified_base 19: mod_base = OTHER; note = 2'-O-methylcytidine-3'-phosphate
  modified_base 20: mod_base = OTHER; note = 2'-O-methyluridine-3'-phosphate
  modified_base 21: mod_base = OTHER; note = 2'-O-methyluridine-3'-phosphorothioate
  modified_base 22: mod_base = OTHER; note = 2'-O-methyluridine-3'-phosphorothioate
  modified_base 23: mod_base = OTHER; note = 2'-O-methylguanosine
ttaagttgtttactcaaactttg

SEQ ID NO: 13048 - RNA, 23 nt, synthetic construct
  source 1..23: mol_type = other RNA
  modified_base 1: mod_base = OTHER; note = 2'-O-methyluridine-3'-phosphorothioate 5'-(E)-Vinylphosphonate
  modified_base 2: mod_base = OTHER; note = 2'-deoxy-2'-fluoroguanosine-3'-phosphorothioate
  modified_base 3: mod_base = OTHER; note = 2'-O-methylcytidine-3'-phosphate
  modified_base 4: mod_base = OTHER; note = 2'-O-methyladenosine-3'-phosphate
  modified_base 5: mod_base = OTHER; note = 2'-O-methyladenosine-3'-phosphate
  modified_base 6: mod_base = OTHER; note = 2'-deoxy-2'-fluorouridine-3'-phosphate
  modified_base 7: mod_base = OTHER; note = 2'-O-methyluridine-3'-phosphate
  modified_base 8: mod_base = OTHER; note = 2'-O-methyluridine-3'-phosphate
  modified_base 9: mod_base = OTHER; note = 2'-O-methyluridine-3'-phosphate
  modified_base 10: mod_base = OTHER; note = 2'-O-methyladenosine-3'-phosphate
  modified_base 11: mod_base = OTHER; note = 2'-O-methyladenosine-3'-phosphate
  modified_base 12: mod_base = OTHER; note = 2'-O-methylguanosine-3'-phosphate
  modified_base 13: mod_base = OTHER; note = 2'-O-methyluridine-3'-phosphate
  modified_base 14: mod_base = OTHER; note = 2'-deoxy-2'-fluorouridine-3'-phosphate
  modified_base 15: mod_base = OTHER; note = 2'-O-methylguanosine-3'-phosphate
  modified_base 16: mod_base = OTHER; note = 2'-deoxy-2'-fluorouridine-3'-phosphate
  modified_base 17: mod_base = OTHER; note = 2'-O-methyluridine-3'-phosphate
  modified_base 18: mod_base = OTHER; note = 2'-O-methyluridine-3'-phosphate
  modified_base 19: mod_base = OTHER; note = 2'-O-methyladenosine-3'-phosphate
  modified_base 20: mod_base = OTHER; note = 2'-O-methylcytidine-3'-phosphate
  modified_base 21: mod_base = OTHER; note = 2'-O-methyluridine-3'-phosphorothioate
  modified_base 22: mod_base = OTHER; note = 2'-O-methylcytidine-3'-phosphorothioate
  modified_base 23: mod_base = OTHER; note = 2'-O-methyladenosine
tgcaattttaagttgtttactca

SEQ ID NO: 13049 - RNA, 23 nt, synthetic construct
  source 1..23: mol_type = other RNA
  modified_base 1: mod_base = OTHER; note = 2'-O-methyluridine-3'-phosphorothioate 5'-(E)-Vinylphosphonate
  modified_base 2: mod_base = OTHER; note = 2'-deoxy-2'-fluorocytidine-3'-phosphorothioate
  modified_base 3: mod_base = OTHER; note = 2'-O-methyladenosine-3'-phosphate
  modified_base 4: mod_base = OTHER; note = 2'-O-methyladenosine-3'-phosphate
  modified_base 5: mod_base = OTHER; note = 2'-O-methylguanosine-3'-phosphate
  modified_base 6: mod_base = OTHER; note = 2'-deoxy-2'-fluorocytidine-3'-phosphate
  modified_base 7: mod_base = OTHER; note = 2'-O-methyladenosine-3'-phosphate
  modified_base 8: mod_base = OTHER; note = 2'-O-methyladenosine-3'-phosphate
  modified_base 9: mod_base = OTHER; note = 2'-O-methyluridine-3'-phosphate
  modified_base 10: mod_base = OTHER; note = 2'-O-methyluridine-3'-phosphate
  modified_base 11: mod_base = OTHER; note = 2'-O-methyluridine-3'-phosphate
  modified_base 12: mod_base = OTHER; note = 2'-O-methyluridine-3'-phosphate
  modified_base 13: mod_base = OTHER; note = 2'-O-methyladenosine-3'-phosphate
  modified_base 14: mod_base = OTHER; note = 2'-deoxy-2'-fluoroadenosine-3'-phosphate
  modified_base 15: mod_base = OTHER; note = 2'-O-methylguanosine-3'-phosphate
  modified_base 16: mod_base = OTHER; note = 2'-deoxy-2'-fluorouridine-3'-phosphate
  modified_base 17: mod_base = OTHER; note = 2'-O-methyluridine-3'-phosphate
  modified_base 18: mod_base = OTHER; note = 2'-O-methylguanosine-3'-phosphate
  modified_base 19: mod_base = OTHER; note = 2'-O-methyluridine-3'-phosphate
  modified_base 20: mod_base = OTHER; note = 2'-O-methyluridine-3'-phosphate
  modified_base 21: mod_base = OTHER; note = 2'-O-methyluridine-3'-phosphorothioate
  modified_base 22: mod_base = OTHER; note = 2'-O-methyladenosine-3'-phosphorothioate
  modified_base 23: mod_base = OTHER; note = 2'-O-methylcytidine
tcaagcaattttaagttgtttac

SEQ ID NO: 13050 - RNA, 23 nt, synthetic construct
  source 1..23: mol_type = other RNA
  modified_base 1: mod_base = OTHER; note = 2'-O-methyluridine-3'-phosphorothioate 5'-(E)-Vinylphosphonate
  modified_base 2: mod_base = OTHER; note = 2'-deoxy-2'-fluorouridine-3'-phosphorothioate
  modified_base 3: mod_base = OTHER; note = 2'-O-methyluridine-3'-phosphate
  modified_base 4: mod_base = OTHER; note = 2'-O-methyladenosine-3'-phosphate
  modified_base 5: mod_base = OTHER; note = 2'-O-methyluridine-3'-phosphate
  modified_base 6: mod_base = OTHER; note = 2'-deoxy-2'-fluorouridine-3'-phosphate
  modified_base 7: mod_base = OTHER; note = 2'-O-methyluridine-3'-phosphate
  modified_base 8: mod_base = OTHER; note = 2'-O-methylcytidine-3'-phosphate
  modified_base 9: mod_base = OTHER; note = 2'-O-methyladenosine-3'-phosphate
  modified_base 10: mod_base = OTHER; note = 2'-O-methyladenosine-3'-phosphate
  modified_base 11: mod_base = OTHER; note = 2'-O-methyluridine-3'-phosphate
  modified_base 12: mod_base = OTHER; note = 2'-O-methylcytidine-3'-phosphate
  modified_base 13: mod_base = OTHER; note = 2'-O-methyladenosine-3'-phosphate
  modified_base 14: mod_base = OTHER; note = 2'-deoxy-2'-fluoroadenosine-3'-phosphate
  modified_base 15: mod_base = OTHER; note = 2'-O-methyladenosine-3'-phosphate
  modified_base 16: mod_base = OTHER; note = 2'-deoxy-2'-fluoroguanosine-3'-phosphate
  modified_base 17: mod_base = OTHER; note = 2'-O-methyladenosine-3'-phosphate
  modified_base 18: mod_base = OTHER; note = 2'-O-methylcytidine-3'-phosphate
  modified_base 19: mod_base = OTHER; note = 2'-O-methyluridine-3'-phosphate
  modified_base 20: mod_base = OTHER; note = 2'-O-methyladenosine-3'-phosphate
  modified_base 21: mod_base = OTHER; note = 2'-O-methyluridine-3'-phosphorothioate
  modified_base 22: mod_base = OTHER; note = 2'-O-methylguanosine-3'-phosphorothioate
  modified_base 23: mod_base = OTHER; note = 2'-O-methylcytidine
tttatttcaatcaaagactatgc

SEQ ID NO: 13051 - RNA, 23 nt, synthetic construct
  source 1..23: mol_type = other RNA
  modified_base 1: mod_base = OTHER; note = 2'-O-methyluridine-3'-phosphorothioate 5'-(E)-Vinylphosphonate
  modified_base 2: mod_base = OTHER; note = 2'-deoxy-2'-fluoroadenosine-3'-phosphorothioate
  modified_base 3: mod_base = OTHER; note = 2'-O-methyluridine-3'-phosphate
  modified_base 4: mod_base = OTHER; note = 2'-O-methyluridine-3'-phosphate
  modified_base 5: mod_base = OTHER; note = 2'-O-methyluridine-3'-phosphate
  modified_base 6: mod_base = OTHER; note = 2'-deoxy-2'-fluoroadenosine-3'-phosphate
  modified_base 7: mod_base = OTHER; note = 2'-O-methylguanosine-3'-phosphate
  modified_base 8: mod_base = OTHER; note = 2'-O-methylcytidine-3'-phosphate
  modified_base 9: mod_base = OTHER; note = 2'-O-methylcytidine-3'-phosphate
  modified_base 10: mod_base = OTHER; note = 2'-O-methyladenosine-3'-phosphate
  modified_base 11: mod_base = OTHER; note = 2'-O-methyladenosine-3'-phosphate
  modified_base 12: mod_base = OTHER; note = 2'-O-methyladenosine-3'-phosphate
  modified_base 13: mod_base = OTHER; note = 2'-O-methyluridine-3'-phosphate
  modified_base 14: mod_base = OTHER; note = 2'-deoxy-2'-fluoroadenosine-3'-phosphate
  modified_base 15: mod_base = OTHER; note = 2'-O-methylcytidine-3'-phosphate
  modified_base 16: mod_base = OTHER; note = 2'-deoxy-2'-fluoroadenosine-3'-phosphate
  modified_base 17: mod_base = OTHER; note = 2'-O-methyluridine-3'-phosphate
  modified_base 18: mod_base = OTHER; note = 2'-O-methyluridine-3'-phosphate
  modified_base 19: mod_base = OTHER; note = 2'-O-methylcytidine-3'-phosphate
  modified_base 20: mod_base = OTHER; note = 2'-O-methyluridine-3'-phosphate
  modified_base 21: mod_base = OTHER; note = 2'-O-methylcytidine-3'-phosphorothioate
  modified_base 22: mod_base = OTHER; note = 2'-O-methyladenosine-3'-phosphorothioate
  modified_base 23: mod_base = OTHER; note = 2'-O-methyluridine
tatttagccaaatacattctcat

SEQ ID NO: 13052 - RNA, 23 nt, synthetic construct
  source 1..23: mol_type = other RNA
  modified_base 1: mod_base = OTHER; note = 2'-O-methyluridine-3'-phosphorothioate 5'-(E)-Vinylphosphonate
  modified_base 2: mod_base = OTHER; note = 2'-deoxy-2'-fluorouridine-3'-phosphorothioate
  modified_base 3: mod_base = OTHER; note = 2'-O-methyladenosine-3'-phosphate
  modified_base 4: mod_base = OTHER; note = 2'-O-methyladenosine-3'-phosphate
  modified_base 5: mod_base = OTHER; note = 2'-O-methyladenosine-3'-phosphate
  modified_base 6: mod_base = OTHER; note = 2'-deoxy-2'-fluoroguanosine-3'-phosphate
  modified_base 7: mod_base = OTHER; note = 2'-O-methylguanosine-3'-phosphate
  modified_base 8: mod_base = OTHER; note = 2'-O-methyladenosine-3'-phosphate
  modified_base 9: mod_base = OTHER; note = 2'-O-methyladenosine-3'-phosphate
  modified_base 10: mod_base = OTHER; note = 2'-O-methyluridine-3'-phosphate
  modified_base 11: mod_base = OTHER; note = 2'-O-methylguanosine-3'-phosphate
  modified_base 12: mod_base = OTHER; note = 2'-O-methyladenosine-3'-phosphate
  modified_base 13: mod_base = OTHER; note = 2'-O-methyluridine-3'-phosphate
  modified_base 14: mod_base = OTHER; note = 2'-deoxy-2'-fluorouridine-3'-phosphate
  modified_base 15: mod_base = OTHER; note = 2'-O-methyladenosine-3'-phosphate
  modified_base 16: mod_base = OTHER; note = 2'-deoxy-2'-fluorouridine-3'-phosphate
  modified_base 17: mod_base = OTHER; note = 2'-O-methyluridine-3'-phosphate
  modified_base 18: mod_base = OTHER; note = 2'-O-methylguanosine-3'-phosphate
  modified_base 19: mod_base = OTHER; note = 2'-O-methyladenosine-3'-phosphate
  modified_base 20: mod_base = OTHER; note = 2'-O-methyladenosine-3'-phosphate
  modified_base 21: mod_base = OTHER; note = 2'-O-methylguanosine-3'-phosphorothioate
  modified_base 22: mod_base = OTHER; note = 2'-O-methyladenosine-3'-phosphorothioate
  modified_base 23: mod_base = OTHER; note = 2'-O-methylcytidine
ttaaaggaatgattattgaagac

SEQ ID NO: 13053 - RNA, 23 nt, synthetic construct
  source 1..23: mol_type = other RNA
  modified_base 1: mod_base = OTHER; note = 2'-O-methyluridine-3'-phosphorothioate 5'-(E)-Vinylphosphonate
  modified_base 2: mod_base = OTHER; note = 2'-deoxy-2'-fluorouridine-3'-phosphorothioate
  modified_base 3: mod_base = OTHER; note = 2'-O-methyluridine-3'-phosphate
  modified_base 4: mod_base = OTHER; note = 2'-O-methylguanosine-3'-phosphate
  modified_base 5: mod_base = OTHER; note = 2'-O-methyluridine-3'-phosphate
  modified_base 6: mod_base = OTHER; note = 2'-deoxy-2'-fluoroadenosine-3'-phosphate
  modified_base 7: mod_base = OTHER; note = 2'-O-methyladenosine-3'-phosphate
  modified_base 8: mod_base = OTHER; note = 2'-O-methyluridine-3'-phosphate
  modified_base 9: mod_base = OTHER; note = 2'-O-methylguanosine-3'-phosphate
  modified_base 10: mod_base = OTHER; note = 2'-O-methyladenosine-3'-phosphate
  modified_base 11: mod_base = OTHER; note = 2'-O-methyluridine-3'-phosphate
  modified_base 12: mod_base = OTHER; note = 2'-O-methylguanosine-3'-phosphate
  modified_base 13: mod_base = OTHER; note = 2'-O-methyluridine-3'-phosphate
  modified_base 14: mod_base = OTHER; note = 2'-deoxy-2'-fluoroguanosine-3'-phosphate
  modified_base 15: mod_base = OTHER; note = 2'-O-methyluridine-3'-phosphate
  modified_base 16: mod_base = OTHER; note = 2'-deoxy-2'-fluorouridine-3'-phosphate
  modified_base 17: mod_base = OTHER; note = 2'-O-methyluridine-3'-phosphate
  modified_base 18: mod_base = OTHER; note = 2'-O-methylguanosine-3'-phosphate
  modified_base 19: mod_base = OTHER; note = 2'-O-methyluridine-3'-phosphate
  modified_base 20: mod_base = OTHER; note = 2'-O-methylguanosine-3'-phosphate
  modified_base 21: mod_base = OTHER; note = 2'-O-methyladenosine-3'-phosphorothioate
  modified_base 22: mod_base = OTHER; note = 2'-O-methyladenosine-3'-phosphorothioate
  modified_base 23: mod_base = OTHER; note = 2'-O-methyluridine
tttgtaatgatgtgtttgtgaat

SEQ ID NO: 13054 - RNA, 23 nt, synthetic construct
  source 1..23: mol_type = other RNA
  modified_base 1: mod_base = OTHER; note = 2'-O-methyluridine-3'-phosphorothioate 5'-(E)-Vinylphosphonate
  modified_base 2: mod_base = OTHER; note = 2'-deoxy-2'-fluorouridine-3'-phosphorothioate
  modified_base 3: mod_base = OTHER; note = 2'-O-methyluridine-3'-phosphate
  modified_base 4: mod_base = OTHER; note = 2'-O-methylguanosine-3'-phosphate
  modified_base 5: mod_base = OTHER; note = 2'-O-methyladenosine-3'-phosphate
  modified_base 6: mod_base = OTHER; note = 2'-deoxy-2'-fluoroadenosine-3'-phosphate
  modified_base 7: mod_base = OTHER; note = 2'-O-methylguanosine-3'-phosphate
  modified_base 8: mod_base = OTHER; note = 2'-O-methyladenosine-3'-phosphate
  modified_base 9: mod_base = OTHER; note = 2'-O-methylcytidine-3'-phosphate
  modified_base 10: mod_base = OTHER; note = 2'-O-methyladenosine-3'-phosphate
  modified_base 11: mod_base = OTHER; note = 2'-O-methyluridine-3'-phosphate
  modified_base 12: mod_base = OTHER; note = 2'-O-methylcytidine-3'-phosphate
  modified_base 13: mod_base = OTHER; note = 2'-O-methyladenosine-3'-phosphate
  modified_base 14: mod_base = OTHER; note = 2'-deoxy-2'-fluoroadenosine-3'-phosphate
  modified_base 15: mod_base = OTHER; note = 2'-O-methylcytidine-3'-phosphate
  modified_base 16: mod_base = OTHER; note = 2'-deoxy-2'-fluorouridine-3'-phosphate
  modified_base 17: mod_base = OTHER; note = 2'-O-methylguanosine-3'-phosphate
  modified_base 18: mod_base = OTHER; note = 2'-O-methylcytidine-3'-phosphate
  modified_base 19: mod_base = OTHER; note = 2'-O-methylcytidine-3'-phosphate
  modified_base 20: mod_base = OTHER; note = 2'-O-methyladenosine-3'-phosphate
  modified_base 21: mod_base = OTHER; note = 2'-O-methylguanosine-3'-phosphorothioate
  modified_base 22: mod_base = OTHER; note = 2'-O-methylcytidine-3'-phosphorothioate
  modified_base 23: mod_base = OTHER; note = 2'-O-methyluridine
tttgaagacatcaactgccagct

SEQ ID NO: 13055 - RNA, 23 nt, synthetic construct
  source 1..23: mol_type = other RNA
  modified_base 1: mod_base = OTHER; note = 2'-O-methyluridine-3'-phosphorothioate 5'-(E)-Vinylphosphonate
  modified_base 2: mod_base = OTHER; note = 2'-deoxy-2'-fluorouridine-3'-phosphorothioate
  modified_base 3: mod_base = OTHER; note = 2'-O-methyladenosine-3'-phosphate
  modified_base 4: mod_base = OTHER; note = 2'-O-methyluridine-3'-phosphate
  modified_base 5: mod_base = OTHER; note = 2'-O-methyluridine-3'-phosphate
  modified_base 6: mod_base = OTHER; note = 2'-deoxy-2'-fluoroguanosine-3'-phosphate
  modified_base 7: mod_base = OTHER; note = 2'-O-methyladenosine-3'-phosphate
  modified_base 8: mod_base = OTHER; note = 2'-O-methyladenosine-3'-phosphate
  modified_base 9: mod_base = OTHER; note = 2'-O-methylguanosine-3'-phosphate
  modified_base 10: mod_base = OTHER; note = 2'-O-methyladenosine-3'-phosphate
  modified_base 11: mod_base = OTHER; note = 2'-O-methylcytidine-3'-phosphate
  modified_base 12: mod_base = OTHER; note = 2'-O-methyladenosine-3'-phosphate
  modified_base 13: mod_base = OTHER; note = 2'-O-methyluridine-3'-phosphate
  modified_base 14: mod_base = OTHER; note = 2'-deoxy-2'-fluorocytidine-3'-phosphate
  modified_base 15: mod_base = OTHER; note = 2'-O-methyladenosine-3'-phosphate
  modified_base 16: mod_base = OTHER; note = 2'-deoxy-2'-fluoroadenosine-3'-phosphate
  modified_base 17: mod_base = OTHER; note = 2'-O-methylcytidine-3'-phosphate
  modified_base 18: mod_base = OTHER; note = 2'-O-methyluridine-3'-phosphate
  modified_base 19: mod_base = OTHER; note = 2'-O-methylguanosine-3'-phosphate
  modified_base 20: mod_base = OTHER; note = 2'-O-methylcytidine-3'-phosphate
  modified_base 21: mod_base = OTHER; note = 2'-O-methylcytidine-3'-phosphorothioate
  modified_base 22: mod_base = OTHER; note = 2'-O-methyladenosine-3'-phosphorothioate
  modified_base 23: mod_base = OTHER; note = 2'-O-methylguanosine
ttattgaagacatcaactgccag

SEQ ID NO: 13056 - RNA, 23 nt, synthetic construct
  source 1..23: mol_type = other RNA
  modified_base 1: mod_base = OTHER; note = 2'-O-methyluridine-3'-phosphorothioate 5'-(E)-Vinylphosphonate
  modified_base 2: mod_base = OTHER; note = 2'-deoxy-2'-fluorouridine-3'-phosphorothioate
  modified_base 3: mod_base = OTHER; note = 2'-O-methyluridine-3'-phosphate
  modified_base 4: mod_base = OTHER; note = 2'-O-methyladenosine-3'-phosphate
  modified_base 5: mod_base = OTHER; note = 2'-O-methyluridine-3'-phosphate
  modified_base 6: mod_base = OTHER; note = 2'-deoxy-2'-fluorouridine-3'-phosphate
  modified_base 7: mod_base = OTHER; note = 2'-O-methylguanosine-3'-phosphate
  modified_base 8: mod_base = OTHER; note = 2'-O-methyladenosine-3'-phosphate
  modified_base 9: mod_base = OTHER; note = 2'-O-methyladenosine-3'-phosphate
  modified_base 10: mod_base = OTHER; note = 2'-O-methylguanosine-3'-phosphate
  modified_base 11: mod_base = OTHER; note = 2'-O-methyladenosine-3'-phosphate
  modified_base 12: mod_base = OTHER; note = 2'-O-methylcytidine-3'-phosphate
  modified_base 13: mod_base = OTHER; note = 2'-O-methyladenosine-3'-phosphate
  modified_base 14: mod_base = OTHER; note = 2'-deoxy-2'-fluorouridine-3'-phosphate
  modified_base 15: mod_base = OTHER; note = 2'-O-methylcytidine-3'-phosphate
  modified_base 16: mod_base = OTHER; note = 2'-deoxy-2'-fluoroadenosine-3'-phosphate
  modified_base 17: mod_base = OTHER; note = 2'-O-methyladenosine-3'-phosphate
  modified_base 18: mod_base = OTHER; note = 2'-O-methylcytidine-3'-phosphate
  modified_base 19: mod_base = OTHER; note = 2'-O-methyluridine-3'-phosphate
  modified_base 20: mod_base = OTHER; note = 2'-O-methylguanosine-3'-phosphate
  modified_base 21: mod_base = OTHER; note = 2'-O-methylcytidine-3'-phosphorothioate
  modified_base 22: mod_base = OTHER; note = 2'-O-methylcytidine-3'-phosphorothioate
  modified_base 23: mod_base = OTHER; note = 2'-O-methyladenosine
tttattgaagacatcaactgcca

SEQ ID NO: 13057 - RNA, 23 nt, synthetic construct
  source 1..23: mol_type = other RNA
  modified_base 1: mod_base = OTHER; note = 2'-O-methyluridine-3'-phosphorothioate 5'-(E)-Vinylphosphonate
  modified_base 2: mod_base = OTHER; note = 2'-deoxy-2'-fluoroadenosine-3'-phosphorothioate
  modified_base 3: mod_base = OTHER; note = 2'-O-methyluridine-3'-phosphate
  modified_base 4: mod_base = OTHER; note = 2'-O-methyluridine-3'-phosphate
  modified_base 5: mod_base = OTHER; note = 2'-O-methyladenosine-3'-phosphate
  modified_base 6: mod_base = OTHER; note = 2'-deoxy-2'-fluorouridine-3'-phosphate
  modified_base 7: mod_base = OTHER; note = 2'-O-methyluridine-3'-phosphate
  modified_base 8: mod_base = OTHER; note = 2'-O-methylguanosine-3'-phosphate
  modified_base 9: mod_base = OTHER; note = 2'-O-methyladenosine-3'-phosphate
  modified_base 10: mod_base = OTHER; note = 2'-O-methyladenosine-3'-phosphate
  modified_base 11: mod_base = OTHER; note = 2'-O-methylguanosine-3'-phosphate
  modified_base 12: mod_base = OTHER; note = 2'-O-methyladenosine-3'-phosphate
  modified_base 13: mod_base = OTHER; note = 2'-O-methylcytidine-3'-phosphate
  modified_base 14: mod_base = OTHER; note = 2'-deoxy-2'-fluoroadenosine-3'-phosphate
  modified_base 15: mod_base = OTHER; note = 2'-O-methyluridine-3'-phosphate
  modified_base 16: mod_base = OTHER; note = 2'-deoxy-2'-fluorocytidine-3'-phosphate
  modified_base 17: mod_base = OTHER; note = 2'-O-methyladenosine-3'-phosphate
  modified_base 18: mod_base = OTHER; note = 2'-O-methyladenosine-3'-phosphate
  modified_base 19: mod_base = OTHER; note = 2'-O-methylcytidine-3'-phosphate
  modified_base 20: mod_base = OTHER; note = 2'-O-methyluridine-3'-phosphate
  modified_base 21: mod_base = OTHER; note = 2'-O-methylguanosine-3'-phosphorothioate
  modified_base 22: mod_base = OTHER; note = 2'-O-methylcytidine-3'-phosphorothioate
  modified_base 23: mod_base = OTHER; note = 2'-O-methylcytidine
tattattgaagacatcaactgcc

SEQ ID NO: 13058 - RNA, 23 nt, synthetic construct
  source 1..23: mol_type = other RNA
  modified_base 1: mod_base = OTHER; note = 2'-O-methyluridine-3'-phosphorothioate 5'-(E)-Vinylphosphonate
  modified_base 2: mod_base = OTHER; note = 2'-deoxy-2'-fluoroguanosine-3'-phosphorothioate
  modified_base 3: mod_base = OTHER; note = 2'-O-methyladenosine-3'-phosphate
  modified_base 4: mod_base = OTHER; note = 2'-O-methyluridine-3'-phosphate
  modified_base 5: mod_base = OTHER; note = 2'-O-methyluridine-3'-phosphate
  modified_base 6: mod_base = OTHER; note = 2'-deoxy-2'-fluoroadenosine-3'-phosphate
  modified_base 7: mod_base = OTHER; note = 2'-O-methyluridine-3'-phosphate
  modified_base 8: mod_base = OTHER; note = 2'-O-methyluridine-3'-phosphate
  modified_base 9: mod_base = OTHER; note = 2'-O-methylguanosine-3'-phosphate
  modified_base 10: mod_base = OTHER; note = 2'-O-methyladenosine-3'-phosphate
  modified_base 11: mod_base = OTHER; note = 2'-O-methyladenosine-3'-phosphate
  modified_base 12: mod_base = OTHER; note = 2'-O-methylguanosine-3'-phosphate
  modified_base 13: mod_base = OTHER; note = 2'-O-methyladenosine-3'-phosphate
  modified_base 14: mod_base = OTHER; note = 2'-deoxy-2'-fluorocytidine-3'-phosphate
  modified_base 15: mod_base = OTHER; note = 2'-O-methyladenosine-3'-phosphate
  modified_base 16: mod_base = OTHER; note = 2'-deoxy-2'-fluorouridine-3'-phosphate
  modified_base 17: mod_base = OTHER; note = 2'-O-methylcytidine-3'-phosphate
  modified_base 18: mod_base = OTHER; note = 2'-O-methyladenosine-3'-phosphate
  modified_base 19: mod_base = OTHER; note = 2'-O-methyladenosine-3'-phosphate
  modified_base 20: mod_base = OTHER; note = 2'-O-methylcytidine-3'-phosphate
  modified_base 21: mod_base = OTHER; note = 2'-O-methyluridine-3'-phosphorothioate
  modified_base 22: mod_base = OTHER; note = 2'-O-methylguanosine-3'-phosphorothioate
  modified_base 23: mod_base = OTHER; note = 2'-O-methylcytidine
tgattattgaagacatcaactgc

SEQ ID NO: 13059 - RNA, 23 nt, synthetic construct
  source 1..23: mol_type = other RNA
  modified_base 1: mod_base = OTHER; note = 2'-O-methyluridine-3'-phosphorothioate 5'-(E)-Vinylphosphonate
  modified_base 2: mod_base = OTHER; note = 2'-deoxy-2'-fluorouridine-3'-phosphorothioate
  modified_base 3: mod_base = OTHER; note = 2'-O-methylguanosine-3'-phosphate
  modified_base 4: mod_base = OTHER; note = 2'-O-methyladenosine-3'-phosphate
  modified_base 5: mod_base = OTHER; note = 2'-O-methyluridine-3'-phosphate
  modified_base 6: mod_base = OTHER; note = 2'-deoxy-2'-fluorouridine-3'-phosphate
  modified_base 7: mod_base = OTHER; note = 2'-O-methyladenosine-3'-phosphate
  modified_base 8: mod_base = OTHER; note = 2'-O-methyluridine-3'-phosphate
  modified_base 9: mod_base = OTHER; note = 2'-O-methyluridine-3'-phosphate
  modified_base 10: mod_base = OTHER; note = 2'-O-methylguanosine-3'-phosphate
  modified_base 11: mod_base = OTHER; note = 2'-O-methyladenosine-3'-phosphate
  modified_base 12: mod_base = OTHER; note = 2'-O-methyladenosine-3'-phosphate
  modified_base 13: mod_base = OTHER; note = 2'-O-methylguanosine-3'-phosphate
  modified_base 14: mod_base = OTHER; note = 2'-deoxy-2'-fluoroadenosine-3'-phosphate
  modified_base 15: mod_base = OTHER; note = 2'-O-methylcytidine-3'-phosphate
  modified_base 16: mod_base = OTHER; note = 2'-deoxy-2'-fluoroadenosine-3'-phosphate
  modified_base 17: mod_base = OTHER; note = 2'-O-methyluridine-3'-phosphate
  modified_base 18: mod_base = OTHER; note = 2'-O-methylcytidine-3'-phosphate
  modified_base 19: mod_base = OTHER; note = 2'-O-methyladenosine-3'-phosphate
  modified_base 20: mod_base = OTHER; note = 2'-O-methyladenosine-3'-phosphate
  modified_base 21: mod_base = OTHER; note = 2'-O-methylcytidine-3'-phosphorothioate
  modified_base 22: mod_base = OTHER; note = 2'-O-methyluridine-3'-phosphorothioate
  modified_base 23: mod_base = OTHER; note = 2'-O-methylguanosine
ttgattattgaagacatcaactg

SEQ ID NO: 13060 - RNA, 23 nt, synthetic construct
  source 1..23: mol_type = other RNA
  modified_base 1: mod_base = OTHER; note = 2'-O-methyluridine-3'-phosphorothioate 5'-(E)-Vinylphosphonate
  modified_base 2: mod_base = OTHER; note = 2'-deoxy-2'-fluoroadenosine-3'-phosphorothioate
  modified_base 3: mod_base = OTHER; note = 2'-O-methyluridine-3'-phosphate
  modified_base 4: mod_base = OTHER; note = 2'-O-methylguanosine-3'-phosphate
  modified_base 5: mod_base = OTHER; note = 2'-O-methyladenosine-3'-phosphate
  modified_base 6: mod_base = OTHER; note = 2'-deoxy-2'-fluorouridine-3'-phosphate
  modified_base 7: mod_base = OTHER; note = 2'-O-methyluridine-3'-phosphate
  modified_base 8: mod_base = OTHER; note = 2'-O-methyladenosine-3'-phosphate
  modified_base 9: mod_base = OTHER; note = 2'-O-methyluridine-3'-phosphate
  modified_base 10: mod_base = OTHER; note = 2'-O-methyluridine-3'-phosphate
  modified_base 11: mod_base = OTHER; note = 2'-O-methylguanosine-3'-phosphate
  modified_base 12: mod_base = OTHER; note = 2'-O-methyladenosine-3'-phosphate
  modified_base 13: mod_base = OTHER; note = 2'-O-methyladenosine-3'-phosphate
  modified_base 14: mod_base = OTHER; note = 2'-deoxy-2'-fluoroguanosine-3'-phosphate
  modified_base 15: mod_base = OTHER; note = 2'-O-methyladenosine-3'-phosphate
  modified_base 16: mod_base = OTHER; note = 2'-deoxy-2'-fluorocytidine-3'-phosphate
  modified_base 17: mod_base = OTHER; note = 2'-O-methyladenosine-3'-phosphate
  modified_base 18: mod_base = OTHER; note = 2'-O-methyluridine-3'-phosphate
  modified_base 19: mod_base = OTHER; note = 2'-O-methylcytidine-3'-phosphate
  modified_base 20: mod_base = OTHER; note = 2'-O-methyladenosine-3'-phosphate
  modified_base 21: mod_base = OTHER; note = 2'-O-methyladenosine-3'-phosphorothioate
  modified_base 22: mod_base = OTHER; note = 2'-O-methylcytidine-3'-phosphorothioate
  modified_base 23: mod_base = OTHER; note = 2'-O-methyluridine
tatgattattgaagacatcaact

SEQ ID NO: 13061 - RNA, 23 nt, synthetic construct
  source 1..23: mol_type = other RNA
  modified_base 1: mod_base = OTHER; note = 2'-O-methyluridine-3'-phosphorothioate 5'-(E)-Vinylphosphonate
  modified_base 2: mod_base = OTHER; note = 2'-deoxy-2'-fluoroadenosine-3'-phosphorothioate
  modified_base 3: mod_base = OTHER; note = 2'-O-methyladenosine-3'-phosphate
  modified_base 4: mod_base = OTHER; note = 2'-O-methyluridine-3'-phosphate
  modified_base 5: mod_base = OTHER; note = 2'-O-methylguanosine-3'-phosphate
  modified_base 6: mod_base = OTHER; note = 2'-deoxy-2'-fluoroadenosine-3'-phosphate
  modified_base 7: mod_base = OTHER; note = 2'-O-methyluridine-3'-phosphate
  modified_base 8: mod_base = OTHER; note = 2'-O-methyluridine-3'-phosphate
  modified_base 9: mod_base = OTHER; note = 2'-O-methyladenosine-3'-phosphate
  modified_base 10: mod_base = OTHER; note = 2'-O-methyluridine-3'-phosphate
  modified_base 11: mod_base = OTHER; note = 2'-O-methyluridine-3'-phosphate
  modified_base 12: mod_base = OTHER; note = 2'-O-methylguanosine-3'-phosphate
  modified_base 13: mod_base = OTHER; note = 2'-O-methyladenosine-3'-phosphate
  modified_base 14: mod_base = OTHER; note = 2'-deoxy-2'-fluoroadenosine-3'-phosphate
  modified_base 15: mod_base = OTHER; note = 2'-O-methylguanosine-3'-phosphate
  modified_base 16: mod_base = OTHER; note = 2'-deoxy-2'-fluoroadenosine-3'-phosphate
  modified_base 17: mod_base = OTHER; note = 2'-O-methylcytidine-3'-phosphate
  modified_base 18: mod_base = OTHER; note = 2'-O-methyladenosine-3'-phosphate
  modified_base 19: mod_base = OTHER; note = 2'-O-methyluridine-3'-phosphate
  modified_base 20: mod_base = OTHER; note = 2'-O-methylcytidine-3'-phosphate
  modified_base 21: mod_base = OTHER; note = 2'-O-methyladenosine-3'-phosphorothioate
  modified_base 22: mod_base = OTHER; note = 2'-O-methyladenosine-3'-phosphorothioate
  modified_base 23: mod_base = OTHER; note = 2'-O-methylcytidine
taatgattattgaagacatcaac

SEQ ID NO: 13062 - RNA, 23 nt, synthetic construct
  source 1..23: mol_type = other RNA
  modified_base 1: mod_base = OTHER; note = 2'-O-methyluridine-3'-phosphorothioate 5'-(E)-Vinylphosphonate
  modified_base 2: mod_base = OTHER; note = 2'-deoxy-2'-fluoroguanosine-3'-phosphorothioate
  modified_base 3: mod_base = OTHER; note = 2'-O-methyladenosine-3'-phosphate
  modified_base 4: mod_base = OTHER; note = 2'-O-methyladenosine-3'-phosphate
  modified_base 5: mod_base = OTHER; note = 2'-O-methyluridine-3'-phosphate
  modified_base 6: mod_base = OTHER; note = 2'-deoxy-2'-fluoroguanosine-3'-phosphate
  modified_base 7: mod_base = OTHER; note = 2'-O-methyladenosine-3'-phosphate
  modified_base 8: mod_base = OTHER; note = 2'-O-methyluridine-3'-phosphate
  modified_base 9: mod_base = OTHER; note = 2'-O-methyluridine-3'-phosphate
  modified_base 10: mod_base = OTHER; note = 2'-O-methyladenosine-3'-phosphate
  modified_base 11: mod_base = OTHER; note = 2'-O-methyluridine-3'-phosphate
  modified_base 12: mod_base = OTHER; note = 2'-O-methyluridine-3'-phosphate
  modified_base 13: mod_base = OTHER; note = 2'-O-methylguanosine-3'-phosphate
  modified_base 14: mod_base = OTHER; note = 2'-deoxy-2'-fluoroadenosine-3'-phosphate
  modified_base 15: mod_base = OTHER; note = 2'-O-methyladenosine-3'-phosphate
  modified_base 16: mod_base = OTHER; note = 2'-deoxy-2'-fluoroguanosine-3'-phosphate
  modified_base 17: mod_base = OTHER; note = 2'-O-methyladenosine-3'-phosphate
  modified_base 18: mod_base = OTHER; note = 2'-O-methylcytidine-3'-phosphate
  modified_base 19: mod_base = OTHER; note = 2'-O-methyladenosine-3'-phosphate
  modified_base 20: mod_base = OTHER; note = 2'-O-methyluridine-3'-phosphate
  modified_base 21: mod_base = OTHER; note = 2'-O-methylcytidine-3'-phosphorothioate
  modified_base 22: mod_base = OTHER; note = 2'-O-methyladenosine-3'-phosphorothioate
  modified_base 23: mod_base = OTHER; note = 2'-O-methyladenosine
tgaatgattattgaagacatcaa

SEQ ID NO: 13063 - RNA, 23 nt, synthetic construct
  source 1..23: mol_type = other RNA
  modified_base 1: mod_base = OTHER; note = 2'-O-methyluridine-3'-phosphorothioate 5'-(E)-Vinylphosphonate
  modified_base 2: mod_base = OTHER; note = 2'-deoxy-2'-fluoroguanosine-3'-phosphorothioate
  modified_base 3: mod_base = OTHER; note = 2'-O-methylguanosine-3'-phosphate
  modified_base 4: mod_base = OTHER; note = 2'-O-methyladenosine-3'-phosphate
  modified_base 5: mod_base = OTHER; note = 2'-O-methyladenosine-3'-phosphate
  modified_base 6: mod_base = OTHER; note = 2'-deoxy-2'-fluorouridine-3'-phosphate
  modified_base 7: mod_base = OTHER; note = 2'-O-methylguanosine-3'-phosphate
  modified_base 8: mod_base = OTHER; note = 2'-O-methyladenosine-3'-phosphate
  modified_base 9: mod_base = OTHER; note = 2'-O-methyluridine-3'-phosphate
  modified_base 10: mod_base = OTHER; note = 2'-O-methyluridine-3'-phosphate
  modified_base 11: mod_base = OTHER; note = 2'-O-methyladenosine-3'-phosphate
  modified_base 12: mod_base = OTHER; note = 2'-O-methyluridine-3'-phosphate
  modified_base 13: mod_base = OTHER; note = 2'-O-methyluridine-3'-phosphate
  modified_base 14: mod_base = OTHER; note = 2'-deoxy-2'-fluoroguanosine-3'-phosphate
  modified_base 15: mod_base = OTHER; note = 2'-O-methyladenosine-3'-phosphate
  modified_base 16: mod_base = OTHER; note = 2'-deoxy-2'-fluoroadenosine-3'-phosphate
  modified_base 17: mod_base = OTHER; note = 2'-O-methylguanosine-3'-phosphate
  modified_base 18: mod_base = OTHER; note = 2'-O-methyladenosine-3'-phosphate
  modified_base 19: mod_base = OTHER; note = 2'-O-methylcytidine-3'-phosphate
  modified_base 20: mod_base = OTHER; note = 2'-O-methyladenosine-3'-phosphate
  modified_base 21: mod_base = OTHER; note = 2'-O-methyluridine-3'-phosphorothioate
  modified_base 22: mod_base = OTHER; note = 2'-O-methylcytidine-3'-phosphorothioate
  modified_base 23: mod_base = OTHER; note = 2'-O-methyladenosine
tggaatgattattgaagacatca

SEQ ID NO: 13064 - RNA, 23 nt, synthetic construct
  source 1..23: mol_type = other RNA
  modified_base 1: mod_base = OTHER; note = 2'-O-methyluridine-3'-phosphorothioate 5'-(E)-Vinylphosphonate
  modified_base 2: mod_base = OTHER; note = 2'-deoxy-2'-fluoroadenosine-3'-phosphorothioate
  modified_base 3: mod_base = OTHER; note = 2'-O-methylguanosine-3'-phosphate
  modified_base 4: mod_base = OTHER; note = 2'-O-methylguanosine-3'-phosphate
  modified_base 5: mod_base = OTHER; note = 2'-O-methyladenosine-3'-phosphate
  modified_base 6: mod_base = OTHER; note = 2'-deoxy-2'-fluoroadenosine-3'-phosphate
  modified_base 7: mod_base = OTHER; note = 2'-O-methyluridine-3'-phosphate
  modified_base 8: mod_base = OTHER; note = 2'-O-methylguanosine-3'-phosphate
  modified_base 9: mod_base = OTHER; note = 2'-O-methyladenosine-3'-phosphate
  modified_base 10: mod_base = OTHER; note = 2'-O-methyluridine-3'-phosphate
  modified_base 11: mod_base = OTHER; note = 2'-O-methyluridine-3'-phosphate
  modified_base 12: mod_base = OTHER; note = 2'-O-methyladenosine-3'-phosphate
  modified_base 13: mod_base = OTHER; note = 2'-O-methyluridine-3'-phosphate
  modified_base 14: mod_base = OTHER; note = 2'-deoxy-2'-fluorouridine-3'-phosphate
  modified_base 15: mod_base = OTHER; note = 2'-O-methylguanosine-3'-phosphate
  modified_base 16: mod_base = OTHER; note = 2'-deoxy-2'-fluoroadenosine-3'-phosphate
  modified_base 17: mod_base = OTHER; note = 2'-O-methyladenosine-3'-phosphate
  modified_base 18: mod_base = OTHER; note = 2'-O-methylguanosine-3'-phosphate
  modified_base 19: mod_base = OTHER; note = 2'-O-methyladenosine-3'-phosphate
  modified_base 20: mod_base = OTHER; note = 2'-O-methylcytidine-3'-phosphate
  modified_base 21: mod_base = OTHER; note = 2'-O-methyladenosine-3'-phosphorothioate
  modified_base 22: mod_base = OTHER; note = 2'-O-methyluridine-3'-phosphorothioate
  modified_base 23: mod_base = OTHER; note = 2'-O-methylcytidine
taggaatgattattgaagacatc

SEQ ID NO: 13065 - RNA, 23 nt, synthetic construct
  source 1..23: mol_type = other RNA
  modified_base 1: mod_base = OTHER; note = 2'-O-methyluridine-3'-phosphorothioate 5'-(E)-Vinylphosphonate
  modified_base 2: mod_base = OTHER; note = 2'-deoxy-2'-fluoroadenosine-3'-phosphorothioate
  modified_base 3: mod_base = OTHER; note = 2'-O-methyladenosine-3'-phosphate
  modified_base 4: mod_base = OTHER; note = 2'-O-methylguanosine-3'-phosphate
  modified_base 5: mod_base = OTHER; note = 2'-O-methylguanosine-3'-phosphate
  modified_base 6: mod_base = OTHER; note = 2'-deoxy-2'-fluoroadenosine-3'-phosphate
  modified_base 7: mod_base = OTHER; note = 2'-O-methyladenosine-3'-phosphate
  modified_base 8: mod_base = OTHER; note = 2'-O-methyluridine-3'-phosphate
  modified_base 9: mod_base = OTHER; note = 2'-O-methylguanosine-3'-phosphate
  modified_base 10: mod_base = OTHER; note = 2'-O-methyladenosine-3'-phosphate
  modified_base 11: mod_base = OTHER; note = 2'-O-methyluridine-3'-phosphate
  modified_base 12: mod_base = OTHER; note = 2'-O-methyluridine-3'-phosphate
  modified_base 13: mod_base = OTHER; note = 2'-O-methyladenosine-3'-phosphate
  modified_base 14: mod_base = OTHER; note = 2'-deoxy-2'-fluorouridine-3'-phosphate
  modified_base 15: mod_base = OTHER; note = 2'-O-methyluridine-3'-phosphate
  modified_base 16: mod_base = OTHER; note = 2'-deoxy-2'-fluoroguanosine-3'-phosphate
  modified_base 17: mod_base = OTHER; note = 2'-O-methyladenosine-3'-phosphate
  modified_base 18: mod_base = OTHER; note = 2'-O-methyladenosine-3'-phosphate
  modified_base 19: mod_base = OTHER; note = 2'-O-methylguanosine-3'-phosphate
  modified_base 20: mod_base = OTHER; note = 2'-O-methyladenosine-3'-phosphate
  modified_base 21: mod_base = OTHER; note = 2'-O-methylcytidine-3'-phosphorothioate
  modified_base 22: mod_base = OTHER; note = 2'-O-methyladenosine-3'-phosphorothioate
  modified_base 23: mod_base = OTHER; note = 2'-O-methyluridine
taaggaatgattattgaagacat

SEQ ID NO: 13066 - RNA, 23 nt, synthetic construct
  source 1..23: mol_type = other RNA
  modified_base 1: mod_base = OTHER; note = 2'-O-methyluridine-3'-phosphorothioate 5'-(E)-Vinylphosphonate
  modified_base 2: mod_base = OTHER; note = 2'-deoxy-2'-fluoroadenosine-3'-phosphorothioate
  modified_base 3: mod_base = OTHER; note = 2'-O-methyladenosine-3'-phosphate
  modified_base 4: mod_base = OTHER; note = 2'-O-methyladenosine-3'-phosphate
  modified_base 5: mod_base = OTHER; note = 2'-O-methylguanosine-3'-phosphate
  modified_base 6: mod_base = OTHER; note = 2'-deoxy-2'-fluoroguanosine-3'-phosphate
  modified_base 7: mod_base = OTHER; note = 2'-O-methyladenosine-3'-phosphate
  modified_base 8: mod_base = OTHER; note = 2'-O-methyladenosine-3'-phosphate
  modified_base 9: mod_base = OTHER; note = 2'-O-methyluridine-3'-phosphate
  modified_base 10: mod_base = OTHER; note = 2'-O-methylguanosine-3'-phosphate
  modified_base 11: mod_base = OTHER; note = 2'-O-methyladenosine-3'-phosphate
  modified_base 12: mod_base = OTHER; note = 2'-O-methyluridine-3'-phosphate
  modified_base 13: mod_base = OTHER; note = 2'-O-methyluridine-3'-phosphate
  modified_base 14: mod_base = OTHER; note = 2'-deoxy-2'-fluoroadenosine-3'-phosphate
  modified_base 15: mod_base = OTHER; note = 2'-O-methyluridine-3'-phosphate
  modified_base 16: mod_base = OTHER; note = 2'-deoxy-2'-fluorouridine-3'-phosphate
  modified_base 17: mod_base = OTHER; note = 2'-O-methylguanosine-3'-phosphate
  modified_base 18: mod_base = OTHER; note = 2'-O-methyladenosine-3'-phosphate
  modified_base 19: mod_base = OTHER; note = 2'-O-methyladenosine-3'-phosphate
  modified_base 20: mod_base = OTHER; note = 2'-O-methylguanosine-3'-phosphate
  modified_base 21: mod_base = OTHER; note = 2'-O-methyladenosine-3'-phosphorothioate
  modified_base 22: mod_base = OTHER; note = 2'-O-methylcytidine-3'-phosphorothioate
  modified_base 23: mod_base = OTHER; note = 2'-O-methyladenosine
taaaggaatgattattgaagaca

SEQ ID NO: 13067 - RNA, 23 nt, synthetic construct
  source 1..23: mol_type = other RNA
  modified_base 1: mod_base = OTHER; note = 2'-O-methyluridine-3'-phosphorothioate 5'-(E)-Vinylphosphonate
  modified_base 2: mod_base = OTHER; note = 2'-deoxy-2'-fluoroguanosine-3'-phosphorothioate
  modified_base 3: mod_base = OTHER; note = 2'-O-methyluridine-3'-phosphate
  modified_base 4: mod_base = OTHER; note = 2'-O-methyladenosine-3'-phosphate
  modified_base 5: mod_base = OTHER; note = 2'-O-methyladenosine-3'-phosphate
  modified_base 6: mod_base = OTHER; note = 2'-deoxy-2'-fluorouridine-3'-phosphate
  modified_base 7: mod_base = OTHER; note = 2'-O-methylguanosine-3'-phosphate
  modified_base 8: mod_base = OTHER; note = 2'-O-methyladenosine-3'-phosphate
  modified_base 9: mod_base = OTHER; note = 2'-O-methyluridine-3'-phosphate
  modified_base 10: mod_base = OTHER; note = 2'-O-methylguanosine-3'-phosphate
  modified_base 11: mod_base = OTHER; note = 2'-O-methyluridine-3'-phosphate
  modified_base 12: mod_base = OTHER; note = 2'-O-methylguanosine-3'-phosphate
  modified_base 13: mod_base = OTHER; note = 2'-O-methyluridine-3'-phosphate
  modified_base 14: mod_base = OTHER; note = 2'-deoxy-2'-fluorouridine-3'-phosphate
  modified_base 15: mod_base = OTHER; note = 2'-O-methyluridine-3'-phosphate
  modified_base 16: mod_base = OTHER; note = 2'-deoxy-2'-fluoroguanosine-3'-phosphate
  modified_base 17: mod_base = OTHER; note = 2'-O-methyluridine-3'-phosphate
  modified_base 18: mod_base = OTHER; note = 2'-O-methylguanosine-3'-phosphate
  modified_base 19: mod_base = OTHER; note = 2'-O-methyladenosine-3'-phosphate
  modified_base 20: mod_base = OTHER; note = 2'-O-methyladenosine-3'-phosphate
  modified_base 21: mod_base = OTHER; note = 2'-O-methyluridine-3'-phosphorothioate
  modified_base 22: mod_base = OTHER; note = 2'-O-methyluridine-3'-phosphorothioate
  modified_base 23: mod_base = OTHER; note = 2'-O-methyluridine
tgtaatgatgtgtttgtgaattt

SEQ ID NO: 13068 - RNA, 23 nt, synthetic construct
  source 1..23: mol_type = other RNA
  modified_base 1: mod_base = OTHER; note = 2'-O-methyluridine-3'-phosphorothioate 5'-(E)-Vinylphosphonate
  modified_base 2: mod_base = OTHER; note = 2'-deoxy-2'-fluorouridine-3'-phosphorothioate
  modified_base 3: mod_base = OTHER; note = 2'-O-methylguanosine-3'-phosphate
  modified_base 4: mod_base = OTHER; note = 2'-O-methyluridine-3'-phosphate
  modified_base 5: mod_base = OTHER; note = 2'-O-methyladenosine-3'-phosphate
  modified_base 6: mod_base = OTHER; note = 2'-deoxy-2'-fluoroadenosine-3'-phosphate
  modified_base 7: mod_base = OTHER; note = 2'-O-methyluridine-3'-phosphate
  modified_base 8: mod_base = OTHER; note = 2'-O-methylguanosine-3'-phosphate
  modified_base 9: mod_base = OTHER; note = 2'-O-methyladenosine-3'-phosphate
  modified_base 10: mod_base = OTHER; note = 2'-O-methyluridine-3'-phosphate
  modified_base 11: mod_base = OTHER; note = 2'-O-methylguanosine-3'-phosphate
  modified_base 12: mod_base = OTHER; note = 2'-O-methyluridine-3'-phosphate
  modified_base 13: mod_base = OTHER; note = 2'-O-methylguanosine-3'-phosphate
  modified_base 14: mod_base = OTHER; note = 2'-deoxy-2'-fluorouridine-3'-phosphate
  modified_base 15: mod_base = OTHER; note = 2'-O-methyluridine-3'-phosphate
  modified_base 16: mod_base = OTHER; note = 2'-deoxy-2'-fluorouridine-3'-phosphate
  modified_base 17: mod_base = OTHER; note = 2'-O-methylguanosine-3'-phosphate
  modified_base 18: mod_base = OTHER; note = 2'-O-methyluridine-3'-phosphate
  modified_base 19: mod_base = OTHER; note = 2'-O-methylguanosine-3'-phosphate
  modified_base 20: mod_base = OTHER; note = 2'-O-methyladenosine-3'-phosphate
  modified_base 21: mod_base = OTHER; note = 2'-O-methyladenosine-3'-phosphorothioate
  modified_base 22: mod_base = OTHER; note = 2'-O-methyluridine-3'-phosphorothioate
  modified_base 23: mod_base = OTHER; note = 2'-O-methyluridine
ttgtaatgatgtgtttgtgaatt

SEQ ID NO: 13069 - RNA, 23 nt, synthetic construct
  source 1..23: mol_type = other RNA
  modified_base 1: mod_base = OTHER; note = 2'-O-methyluridine-3'-phosphorothioate 5'-(E)-Vinylphosphonate
  modified_base 2: mod_base = OTHER; note = 2'-deoxy-2'-fluorocytidine-3'-phosphorothioate
  modified_base 3: mod_base = OTHER; note = 2'-O-methyluridine-3'-phosphate
  modified_base 4: mod_base = OTHER; note = 2'-O-methyluridine-3'-phosphate
  modified_base 5: mod_base = OTHER; note = 2'-O-methylguanosine-3'-phosphate
  modified_base 6: mod_base = OTHER; note = 2'-deoxy-2'-fluorouridine-3'-phosphate
  modified_base 7: mod_base = OTHER; note = 2'-O-methyladenosine-3'-phosphate
  modified_base 8: mod_base = OTHER; note = 2'-O-methyladenosine-3'-phosphate
  modified_base 9: mod_base = OTHER; note = 2'-O-methyluridine-3'-phosphate
  modified_base 10: mod_base = OTHER; note = 2'-O-methylguanosine-3'-phosphate
  modified_base 11: mod_base = OTHER; note = 2'-O-methyladenosine-3'-phosphate
  modified_base 12: mod_base = OTHER; note = 2'-O-methyluridine-3'-phosphate
  modified_base 13: mod_base = OTHER; note = 2'-O-methylguanosine-3'-phosphate
  modified_base 14: mod_base = OTHER; note = 2'-deoxy-2'-fluorouridine-3'-phosphate
  modified_base 15: mod_base = OTHER; note = 2'-O-methylguanosine-3'-phosphate
  modified_base 16: mod_base = OTHER; note = 2'-deoxy-2'-fluorouridine-3'-phosphate
  modified_base 17: mod_base = OTHER; note = 2'-O-methyluridine-3'-phosphate
  modified_base 18: mod_base = OTHER; note = 2'-O-methyluridine-3'-phosphate
  modified_base 19: mod_base = OTHER; note = 2'-O-methylguanosine-3'-phosphate
  modified_base 20: mod_base = OTHER; note = 2'-O-methyluridine-3'-phosphate
  modified_base 21: mod_base = OTHER; note = 2'-O-methylguanosine-3'-phosphorothioate
  modified_base 22: mod_base = OTHER; note = 2'-O-methyladenosine-3'-phosphorothioate
  modified_base 23: mod_base = OTHER; note = 2'-O-methyladenosine
tcttgtaatgatgtgtttgtgaa

SEQ ID NO: 13070 - RNA, 23 nt, synthetic construct
  source 1..23: mol_type = other RNA
  modified_base 1: mod_base = OTHER; note = 2'-O-methyluridine-3'-phosphorothioate 5'-(E)-Vinylphosphonate
  modified_base 2: mod_base = OTHER; note = 2'-deoxy-2'-fluoroguanosine-3'-phosphorothioate
  modified_base 3: mod_base = OTHER; note = 2'-O-methylcytidine-3'-phosphate
  modified_base 4: mod_base = OTHER; note = 2'-O-methyluridine-3'-phosphate
  modified_base 5: mod_base = OTHER; note = 2'-O-methyluridine-3'-phosphate
  modified_base 6: mod_base = OTHER; note = 2'-deoxy-2'-fluoroguanosine-3'-phosphate
  modified_base 7: mod_base = OTHER; note = 2'-O-methyluridine-3'-phosphate
  modified_base 8: mod_base = OTHER; note = 2'-O-methyladenosine-3'-phosphate
  modified_base 9: mod_base = OTHER; note = 2'-O-methyladenosine-3'-phosphate
  modified_base 10: mod_base = OTHER; note = 2'-O-methyluridine-3'-phosphate
  modified_base 11: mod_base = OTHER; note = 2'-O-methylguanosine-3'-phosphate
  modified_base 12: mod_base = OTHER; note = 2'-O-methyladenosine-3'-phosphate
  modified_base 13: mod_base = OTHER; note = 2'-O-methyluridine-3'-phosphate
  modified_base 14: mod_base = OTHER; note = 2'-deoxy-2'-fluoroguanosine-3'-phosphate
  modified_base 15: mod_base = OTHER; note = 2'-O-methyluridine-3'-phosphate
  modified_base 16: mod_base = OTHER; note = 2'-deoxy-2'-fluoroguanosine-3'-phosphate
  modified_base 17: mod_base = OTHER; note = 2'-O-methyluridine-3'-phosphate
  modified_base 18: mod_base = OTHER; note = 2'-O-methyluridine-3'-phosphate
  modified_base 19: mod_base = OTHER; note = 2'-O-methyluridine-3'-phosphate
  modified_base 20: mod_base = OTHER; note = 2'-O-methylguanosine-3'-phosphate
  modified_base 21: mod_base = OTHER; note = 2'-O-methyluridine-3'-phosphorothioate
  modified_base 22: mod_base = OTHER; note = 2'-O-methylguanosine-3'-phosphorothioate
  modified_base 23: mod_base = OTHER; note = 2'-O-methyladenosine
tgcttgtaatgatgtgtttgtga

SEQ ID NO: 13071 - RNA, 23 nt, synthetic construct
  source 1..23: mol_type = other RNA
  modified_base 1: mod_base = OTHER; note = 2'-O-methyluridine-3'-phosphorothioate 5'-(E)-Vinylphosphonate
  modified_base 2: mod_base = OTHER; note = 2'-deoxy-2'-fluoroadenosine-3'-phosphorothioate
  modified_base 3: mod_base = OTHER; note = 2'-O-methylguanosine-3'-phosphate
  modified_base 4: mod_base = OTHER; note = 2'-O-methylcytidine-3'-phosphate
  modified_base 5: mod_base = OTHER; note = 2'-O-methyluridine-3'-phosphate
  modified_base 6: mod_base = OTHER; note = 2'-deoxy-2'-fluorouridine-3'-phosphate
  modified_base 7: mod_base = OTHER; note = 2'-O-methylguanosine-3'-phosphate
  modified_base 8: mod_base = OTHER; note = 2'-O-methyluridine-3'-phosphate
  modified_base 9: mod_base = OTHER; note = 2'-O-methyladenosine-3'-phosphate
  modified_base 10: mod_base = OTHER; note = 2'-O-methyladenosine-3'-phosphate
  modified_base 11: mod_base = OTHER; note = 2'-O-methyluridine-3'-phosphate
  modified_base 12: mod_base = OTHER; note = 2'-O-methylguanosine-3'-phosphate
  modified_base 13: mod_base = OTHER; note = 2'-O-methyladenosine-3'-phosphate
  modified_base 14: mod_base = OTHER; note = 2'-deoxy-2'-fluorouridine-3'-phosphate
  modified_base 15: mod_base = OTHER; note = 2'-O-methylguanosine-3'-phosphate
  modified_base 16: mod_base = OTHER; note = 2'-deoxy-2'-fluorouridine-3'-phosphate
  modified_base 17: mod_base = OTHER; note = 2'-O-methylguanosine-3'-phosphate
  modified_base 18: mod_base = OTHER; note = 2'-O-methyluridine-3'-phosphate
  modified_base 19: mod_base = OTHER; note = 2'-O-methyluridine-3'-phosphate
  modified_base 20: mod_base = OTHER; note = 2'-O-methyluridine-3'-phosphate
  modified_base 21: mod_base = OTHER; note = 2'-O-methylguanosine-3'-phosphorothioate
  modified_base 22: mod_base = OTHER; note = 2'-O-methyluridine-3'-phosphorothioate
  modified_base 23: mod_base = OTHER; note = 2'-O-methylguanosine
tagcttgtaatgatgtgtttgtg

SEQ ID NO: 13072 - RNA, 23 nt, synthetic construct
  source 1..23: mol_type = other RNA
  modified_base 1: mod_base = OTHER; note = 2'-O-methyluridine-3'-phosphorothioate 5'-(E)-Vinylphosphonate
  modified_base 2: mod_base = OTHER; note = 2'-deoxy-2'-fluorouridine-3'-phosphorothioate
  modified_base 3: mod_base = OTHER; note = 2'-O-methyladenosine-3'-phosphate
  modified_base 4: mod_base = OTHER; note = 2'-O-methylguanosine-3'-phosphate
  modified_base 5: mod_base = OTHER; note = 2'-O-methylcytidine-3'-phosphate
  modified_base 6: mod_base = OTHER; note = 2'-deoxy-2'-fluorouridine-3'-phosphate
  modified_base 7: mod_base = OTHER; note = 2'-O-methyluridine-3'-phosphate
  modified_base 8: mod_base = OTHER; note = 2'-O-methylguanosine-3'-phosphate
  modified_base 9: mod_base = OTHER; note = 2'-O-methyluridine-3'-phosphate
  modified_base 10: mod_base = OTHER; note = 2'-O-methyladenosine-3'-phosphate
  modified_base 11: mod_base = OTHER; note = 2'-O-methyladenosine-3'-phosphate
  modified_base 12: mod_base = OTHER; note = 2'-O-methyluridine-3'-phosphate
  modified_base 13: mod_base = OTHER; note = 2'-O-methylguanosine-3'-phosphate
  modified_base 14: mod_base = OTHER; note = 2'-deoxy-2'-fluoroadenosine-3'-phosphate
  modified_base 15: mod_base = OTHER; note = 2'-O-methyluridine-3'-phosphate
  modified_base 16: mod_base = OTHER; note = 2'-deoxy-2'-fluoroguanosine-3'-phosphate
  modified_base 17: mod_base = OTHER; note = 2'-O-methyluridine-3'-phosphate
  modified_base 18: mod_base = OTHER; note = 2'-O-methylguanosine-3'-phosphate
  modified_base 19: mod_base = OTHER; note = 2'-O-methyluridine-3'-phosphate
  modified_base 20: mod_base = OTHER; note = 2'-O-methyluridine-3'-phosphate
  modified_base 21: mod_base = OTHER; note = 2'-O-methyluridine-3'-phosphorothioate
  modified_base 22: mod_base = OTHER; note = 2'-O-methylguanosine-3'-phosphorothioate
  modified_base 23: mod_base = OTHER; note = 2'-O-methyluridine
ttagcttgtaatgatgtgtttgt

SEQ ID NO: 13073 - RNA, 23 nt, synthetic construct
  source 1..23: mol_type = other RNA
  modified_base 1: mod_base = OTHER; note = 2'-O-methyluridine-3'-phosphorothioate 5'-(E)-Vinylphosphonate
  modified_base 2: mod_base = OTHER; note = 2'-deoxy-2'-fluoroguanosine-3'-phosphorothioate
  modified_base 3: mod_base = OTHER; note = 2'-O-methyluridine-3'-phosphate
  modified_base 4: mod_base = OTHER; note = 2'-O-methyladenosine-3'-phosphate
  modified_base 5: mod_base = OTHER; note = 2'-O-methylguanosine-3'-phosphate
  modified_base 6: mod_base = OTHER; note = 2'-deoxy-2'-fluorocytidine-3'-phosphate
  modified_base 7: mod_base = OTHER; note = 2'-O-methyluridine-3'-phosphate
  modified_base 8: mod_base = OTHER; note = 2'-O-methyluridine-3'-phosphate
  modified_base 9: mod_base = OTHER; note = 2'-O-methylguanosine-3'-phosphate
  modified_base 10: mod_base = OTHER; note = 2'-O-methyluridine-3'-phosphate
  modified_base 11: mod_base = OTHER; note = 2'-O-methyladenosine-3'-phosphate
  modified_base 12: mod_base = OTHER; note = 2'-O-methyladenosine-3'-phosphate
  modified_base 13: mod_base = OTHER; note = 2'-O-methyluridine-3'-phosphate
  modified_base 14: mod_base = OTHER; note = 2'-deoxy-2'-fluoroguanosine-3'-phosphate
  modified_base 15: mod_base = OTHER; note = 2'-O-methyladenosine-3'-phosphate
  modified_base 16: mod_base = OTHER; note = 2'-deoxy-2'-fluorouridine-3'-phosphate
  modified_base 17: mod_base = OTHER; note = 2'-O-methylguanosine-3'-phosphate
  modified_base 18: mod_base = OTHER; note = 2'-O-methyluridine-3'-phosphate
  modified_base 19: mod_base = OTHER; note = 2'-O-methylguanosine-3'-phosphate
  modified_base 20: mod_base = OTHER; note = 2'-O-methyluridine-3'-phosphate
  modified_base 21: mod_base = OTHER; note = 2'-O-methyluridine-3'-phosphorothioate
  modified_base 22: mod_base = OTHER; note = 2'-O-methyluridine-3'-phosphorothioate
  modified_base 23: mod_base = OTHER; note = 2'-O-methylguanosine
tgtagcttgtaatgatgtgtttg

SEQ ID NO: 13074 - RNA, 23 nt, synthetic construct
  source 1..23: mol_type = other RNA
  modified_base 1: mod_base = OTHER; note = 2'-O-methyluridine-3'-phosphorothioate 5'-(E)-Vinylphosphonate
  modified_base 2: mod_base = OTHER; note = 2'-deoxy-2'-fluoroadenosine-3'-phosphorothioate
  modified_base 3: mod_base = OTHER; note = 2'-O-methylguanosine-3'-phosphate
  modified_base 4: mod_base = OTHER; note = 2'-O-methyluridine-3'-phosphate
  modified_base 5: mod_base = OTHER; note = 2'-O-methyladenosine-3'-phosphate
  modified_base 6: mod_base = OTHER; note = 2'-deoxy-2'-fluoroguanosine-3'-phosphate
  modified_base 7: mod_base = OTHER; note = 2'-O-methylcytidine-3'-phosphate
  modified_base 8: mod_base = OTHER; note = 2'-O-methyluridine-3'-phosphate
  modified_base 9: mod_base = OTHER; note = 2'-O-methyluridine-3'-phosphate
  modified_base 10: mod_base = OTHER; note = 2'-O-methylguanosine-3'-phosphate
  modified_base 11: mod_base = OTHER; note = 2'-O-methyluridine-3'-phosphate
  modified_base 12: mod_base = OTHER; note = 2'-O-methyladenosine-3'-phosphate
  modified_base 13: mod_base = OTHER; note = 2'-O-methyladenosine-3'-phosphate
  modified_base 14: mod_base = OTHER; note = 2'-deoxy-2'-fluorouridine-3'-phosphate
  modified_base 15: mod_base = OTHER; note = 2'-O-methylguanosine-3'-phosphate
  modified_base 16: mod_base = OTHER; note = 2'-deoxy-2'-fluoroadenosine-3'-phosphate
  modified_base 17: mod_base = OTHER; note = 2'-O-methyluridine-3'-phosphate
  modified_base 18: mod_base = OTHER; note = 2'-O-methylguanosine-3'-phosphate
  modified_base 19: mod_base = OTHER; note = 2'-O-methyluridine-3'-phosphate
  modified_base 20: mod_base = OTHER; note = 2'-O-methylguanosine-3'-phosphate
  modified_base 21: mod_base = OTHER; note = 2'-O-methyluridine-3'-phosphorothioate
  modified_base 22: mod_base = OTHER; note = 2'-O-methyluridine-3'-phosphorothioate
  modified_base 23: mod_base = OTHER; note = 2'-O-methyluridine
tagtagcttgtaatgatgtgttt

SEQ ID NO: 13075 - RNA, 23 nt, synthetic construct
  source 1..23: mol_type = other RNA
  modified_base 1: mod_base = OTHER; note = 2'-O-methyluridine-3'-phosphorothioate 5'-(E)-Vinylphosphonate
  modified_base 2: mod_base = OTHER; note = 2'-deoxy-2'-fluoroadenosine-3'-phosphorothioate
  modified_base 3: mod_base = OTHER; note = 2'-O-methyladenosine-3'-phosphate
  modified_base 4: mod_base = OTHER; note = 2'-O-methylguanosine-3'-phosphate
  modified_base 5: mod_base = OTHER; note = 2'-O-methyluridine-3'-phosphate
  modified_base 6: mod_base = OTHER; note = 2'-deoxy-2'-fluoroadenosine-3'-phosphate
  modified_base 7: mod_base = OTHER; note = 2'-O-methylguanosine-3'-phosphate
  modified_base 8: mod_base = OTHER; note = 2'-O-methylcytidine-3'-phosphate
  modified_base 9: mod_base = OTHER; note = 2'-O-methyluridine-3'-phosphate
  modified_base 10: mod_base = OTHER; note = 2'-O-methyluridine-3'-phosphate
  modified_base 11: mod_base = OTHER; note = 2'-O-methylguanosine-3'-phosphate
  modified_base 12: mod_base = OTHER; note = 2'-O-methyluridine-3'-phosphate
  modified_base 13: mod_base = OTHER; note = 2'-O-methyladenosine-3'-phosphate
  modified_base 14: mod_base = OTHER; note = 2'-deoxy-2'-fluoroadenosine-3'-phosphate
  modified_base 15: mod_base = OTHER; note = 2'-O-methyluridine-3'-phosphate
  modified_base 16: mod_base = OTHER; note = 2'-deoxy-2'-fluoroguanosine-3'-phosphate
  modified_base 17: mod_base = OTHER; note = 2'-O-methyladenosine-3'-phosphate
  modified_base 18: mod_base = OTHER; note = 2'-O-methyluridine-3'-phosphate
  modified_base 19: mod_base = OTHER; note = 2'-O-methylguanosine-3'-phosphate
  modified_base 20: mod_base = OTHER; note = 2'-O-methyluridine-3'-phosphate
  modified_base 21: mod_base = OTHER; note = 2'-O-methylguanosine-3'-phosphorothioate
  modified_base 22: mod_base = OTHER; note = 2'-O-methyluridine-3'-phosphorothioate
  modified_base 23: mod_base = OTHER; note = 2'-O-methyluridine
taagtagcttgtaatgatgtgtt

SEQ ID NO: 13076 - RNA, 23 nt, synthetic construct
  source 1..23: mol_type = other RNA
  modified_base 1: mod_base = OTHER; note = 2'-O-methyluridine-3'-phosphorothioate 5'-(E)-Vinylphosphonate
  modified_base 2: mod_base = OTHER; note = 2'-deoxy-2'-fluorouridine-3'-phosphorothioate
  modified_base 3: mod_base = OTHER; note = 2'-O-methyladenosine-3'-phosphate
  modified_base 4: mod_base = OTHER; note = 2'-O-methyladenosine-3'-phosphate
  modified_base 5: mod_base = OTHER; note = 2'-O-methyladenosine-3'-phosphate
  modified_base 6: mod_base = OTHER; note = 2'-deoxy-2'-fluorocytidine-3'-phosphate
  modified_base 7: mod_base = OTHER; note = 2'-O-methyladenosine-3'-phosphate
  modified_base 8: mod_base = OTHER; note = 2'-O-methyluridine-3'-phosphate
  modified_base 9: mod_base = OTHER; note = 2'-O-methyluridine-3'-phosphate
  modified_base 10: mod_base = OTHER; note = 2'-O-methyluridine-3'-phosphate
  modified_base 11: mod_base = OTHER; note = 2'-O-methylcytidine-3'-phosphate
  modified_base 12: mod_base = OTHER; note = 2'-O-methyluridine-3'-phosphate
  modified_base 13: mod_base = OTHER; note = 2'-O-methyladenosine-3'-phosphate
  modified_base 14: mod_base = OTHER; note = 2'-deoxy-2'-fluoroadenosine-3'-phosphate
  modified_base 15: mod_base = OTHER; note = 2'-O-methylguanosine-3'-phosphate
  modified_base 16: mod_base = OTHER; note = 2'-deoxy-2'-fluorouridine-3'-phosphate
  modified_base 17: mod_base = OTHER; note = 2'-O-methyladenosine-3'-phosphate
  modified_base 18: mod_base = OTHER; note = 2'-O-methylguanosine-3'-phosphate
  modified_base 19: mod_base = OTHER; note = 2'-O-methylcytidine-3'-phosphate
  modified_base 20: mod_base = OTHER; note = 2'-O-methyluridine-3'-phosphate
  modified_base 21: mod_base = OTHER; note = 2'-O-methyluridine-3'-phosphorothioate
  modified_base 22: mod_base = OTHER; note = 2'-O-methylguanosine-3'-phosphorothioate
  modified_base 23: mod_base = OTHER; note = 2'-O-methyluridine
ttaaacatttctaagtagcttgt

SEQ ID NO: 13077 - RNA, 23 nt, synthetic construct
  source 1..23: mol_type = other RNA
  modified_base 1: mod_base = OTHER; note = 2'-O-methyluridine-3'-phosphorothioate 5'-(E)-Vinylphosphonate
  modified_base 2: mod_base = OTHER; note = 2'-deoxy-2'-fluorouridine-3'-phosphorothioate
  modified_base 3: mod_base = OTHER; note = 2'-O-methyluridine-3'-phosphate
  modified_base 4: mod_base = OTHER; note = 2'-O-methylcytidine-3'-phosphate
  modified_base 5: mod_base = OTHER; note = 2'-O-methyluridine-3'-phosphate
  modified_base 6: mod_base = OTHER; note = 2'-deoxy-2'-fluoroadenosine-3'-phosphate
  modified_base 7: mod_base = OTHER; note = 2'-O-methyladenosine-3'-phosphate
  modified_base 8: mod_base = OTHER; note = 2'-O-methylguanosine-3'-phosphate
  modified_base 9: mod_base = OTHER; note = 2'-O-methyluridine-3'-phosphate
  modified_base 10: mod_base = OTHER; note = 2'-O-methyladenosine-3'-phosphate
  modified_base 11: mod_base = OTHER; note = 2'-O-methylguanosine-3'-phosphate
  modified_base 12: mod_base = OTHER; note = 2'-O-methylcytidine-3'-phosphate
  modified_base 13: mod_base = OTHER; note = 2'-O-methyluridine-3'-phosphate
  modified_base 14: mod_base = OTHER; note = 2'-deoxy-2'-fluorouridine-3'-phosphate
  modified_base 15: mod_base = OTHER; note = 2'-O-methylguanosine-3'-phosphate
  modified_base 16: mod_base = OTHER; note = 2'-deoxy-2'-fluorouridine-3'-phosphate
  modified_base 17: mod_base = OTHER; note = 2'-O-methyladenosine-3'-phosphate
  modified_base 18: mod_base = OTHER; note = 2'-O-methyladenosine-3'-phosphate
  modified_base 19: mod_base = OTHER; note = 2'-O-methyluridine-3'-phosphate
  modified_base 20: mod_base = OTHER; note = 2'-O-methylguanosine-3'-phosphate
  modified_base 21: mod_base = OTHER; note = 2'-O-methyladenosine-3'-phosphorothioate
  modified_base 22: mod_base = OTHER; note = 2'-O-methyluridine-3'-phosphorothioate
  modified_base 23: mod_base = OTHER; note = 2'-O-methylguanosine
tttctaagtagcttgtaatgatg

SEQ ID NO: 13078 - RNA, 23 nt, synthetic construct
  source 1..23: mol_type = other RNA
  modified_base 1: mod_base = OTHER; note = 2'-O-methyluridine-3'-phosphorothioate 5'-(E)-Vinylphosphonate
  modified_base 2: mod_base = OTHER; note = 2'-deoxy-2'-fluoroadenosine-3'-phosphorothioate
  modified_base 3: mod_base = OTHER; note = 2'-O-methyladenosine-3'-phosphate
  modified_base 4: mod_base = OTHER; note = 2'-O-methylcytidine-3'-phosphate
  modified_base 5: mod_base = OTHER; note = 2'-O-methyladenosine-3'-phosphate
  modified_base 6: mod_base = OTHER; note = 2'-deoxy-2'-fluorouridine-3'-phosphate
  modified_base 7: mod_base = OTHER; note = 2'-O-methyluridine-3'-phosphate
  modified_base 8: mod_base = OTHER; note = 2'-O-methyluridine-3'-phosphate
  modified_base 9: mod_base = OTHER; note = 2'-O-methylcytidine-3'-phosphate
  modified_base 10: mod_base = OTHER; note = 2'-O-methyluridine-3'-phosphate
  modified_base 11: mod_base = OTHER; note = 2'-O-methyladenosine-3'-phosphate
  modified_base 12: mod_base = OTHER; note = 2'-O-methyladenosine-3'-phosphate
  modified_base 13: mod_base = OTHER; note = 2'-O-methylguanosine-3'-phosphate
  modified_base 14: mod_base = OTHER; note = 2'-deoxy-2'-fluorouridine-3'-phosphate
  modified_base 15: mod_base = OTHER; note = 2'-O-methyladenosine-3'-phosphate
  modified_base 16: mod_base = OTHER; note = 2'-deoxy-2'-fluoroguanosine-3'-phosphate
  modified_base 17: mod_base = OTHER; note = 2'-O-methylcytidine-3'-phosphate
  modified_base 18: mod_base = OTHER; note = 2'-O-methyluridine-3'-phosphate
  modified_base 19: mod_base = OTHER; note = 2'-O-methyluridine-3'-phosphate
  modified_base 20: mod_base = OTHER; note = 2'-O-methylguanosine-3'-phosphate
  modified_base 21: mod_base = OTHER; note = 2'-O-methyluridine-3'-phosphorothioate
  modified_base 22: mod_base = OTHER; note = 2'-O-methyladenosine-3'-phosphorothioate
  modified_base 23: mod_base = OTHER; note = 2'-O-methyladenosine
taacatttctaagtagcttgtaa

SEQ ID NO: 13079 - RNA, 23 nt, synthetic construct
  source 1..23: mol_type = other RNA
  modified_base 1: mod_base = OTHER; note = 2'-O-methyluridine-3'-phosphorothioate 5'-(E)-Vinylphosphonate
  modified_base 2: mod_base = OTHER; note = 2'-deoxy-2'-fluorouridine-3'-phosphorothioate
  modified_base 3: mod_base = OTHER; note = 2'-O-methyladenosine-3'-phosphate
  modified_base 4: mod_base = OTHER; note = 2'-O-methylcytidine-3'-phosphate
  modified_base 5: mod_base = OTHER; note = 2'-O-methyluridine-3'-phosphate
  modified_base 6: mod_base = OTHER; note = 2'-deoxy-2'-fluoroadenosine-3'-phosphate
  modified_base 7: mod_base = OTHER; note = 2'-O-methyladenosine-3'-phosphate
  modified_base 8: mod_base = OTHER; note = 2'-O-methyladenosine-3'-phosphate
  modified_base 9: mod_base = OTHER; note = 2'-O-methylcytidine-3'-phosphate
  modified_base 10: mod_base = OTHER; note = 2'-O-methyladenosine-3'-phosphate
  modified_base 11: mod_base = OTHER; note = 2'-O-methyluridine-3'-phosphate
  modified_base 12: mod_base = OTHER; note = 2'-O-methyluridine-3'-phosphate
  modified_base 13: mod_base = OTHER; note = 2'-O-methyluridine-3'-phosphate
  modified_base 14: mod_base = OTHER; note = 2'-deoxy-2'-fluorocytidine-3'-phosphate
  modified_base 15: mod_base = OTHER; note = 2'-O-methyluridine-3'-phosphate
  modified_base 16: mod_base = OTHER; note = 2'-deoxy-2'-fluoroadenosine-3'-phosphate
  modified_base 17: mod_base = OTHER; note = 2'-O-methyladenosine-3'-phosphate
  modified_base 18: mod_base = OTHER; note = 2'-O-methylguanosine-3'-phosphate
  modified_base 19: mod_base = OTHER; note = 2'-O-methyluridine-3'-phosphate
  modified_base 20: mod_base = OTHER; note = 2'-O-methyladenosine-3'-phosphate
  modified_base 21: mod_base = OTHER; note = 2'-O-methylguanosine-3'-phosphorothioate
  modified_base 22: mod_base = OTHER; note = 2'-O-methylcytidine-3'-phosphorothioate
  modified_base 23: mod_base = OTHER; note = 2'-O-methyluridine
ttactaaacatttctaagtagct

SEQ ID NO: 13080 - RNA, 23 nt, synthetic construct
  source 1..23: mol_type = other RNA
  modified_base 1: mod_base = OTHER; note = 2'-O-methyluridine-3'-phosphorothioate 5'-(E)-Vinylphosphonate
  modified_base 2: mod_base = OTHER; note = 2'-deoxy-2'-fluoroadenosine-3'-phosphorothioate
  modified_base 3: mod_base = OTHER; note = 2'-O-methyladenosine-3'-phosphate
  modified_base 4: mod_base = OTHER; note = 2'-O-methyladenosine-3'-phosphate
  modified_base 5: mod_base = OTHER; note = 2'-O-methylcytidine-3'-phosphate
  modified_base 6: mod_base = OTHER; note = 2'-deoxy-2'-fluoroadenosine-3'-phosphate
  modified_base 7: mod_base = OTHER; note = 2'-O-methylguanosine-3'-phosphate
  modified_base 8: mod_base = OTHER; note = 2'-O-methyladenosine-3'-phosphate
  modified_base 9: mod_base = OTHER; note = 2'-O-methyladenosine-3'-phosphate
  modified_base 10: mod_base = OTHER; note = 2'-O-methyladenosine-3'-phosphate
  modified_base 11: mod_base = OTHER; note = 2'-O-methyluridine-3'-phosphate
  modified_base 12: mod_base = OTHER; note = 2'-O-methyladenosine-3'-phosphate
  modified_base 13: mod_base = OTHER; note = 2'-O-methylguanosine-3'-phosphate
  modified_base 14: mod_base = OTHER; note = 2'-deoxy-2'-fluorouridine-3'-phosphate
  modified_base 15: mod_base = OTHER; note = 2'-O-methyladenosine-3'-phosphate
  modified_base 16: mod_base = OTHER; note = 2'-deoxy-2'-fluorouridine-3'-phosphate
  modified_base 17: mod_base = OTHER; note = 2'-O-methylguanosine-3'-phosphate
  modified_base 18: mod_base = OTHER; note = 2'-O-methyluridine-3'-phosphate
  modified_base 19: mod_base = OTHER; note = 2'-O-methyluridine-3'-phosphate
  modified_base 20: mod_base = OTHER; note = 2'-O-methyluridine-3'-phosphate
  modified_base 21: mod_base = OTHER; note = 2'-O-methylcytidine-3'-phosphorothioate
  modified_base 22: mod_base = OTHER; note = 2'-O-methyladenosine-3'-phosphorothioate
  modified_base 23: mod_base = OTHER; note = 2'-O-methylcytidine
taaacagaaatagtatgtttcac

SEQ ID NO: 13081 - RNA, 23 nt, synthetic construct
  source 1..23: mol_type = other RNA
  modified_base 1: mod_base = OTHER; note = 2'-O-methyluridine-3'-phosphorothioate 5'-(E)-Vinylphosphonate
  modified_base 2: mod_base = OTHER; note = 2'-deoxy-2'-fluorouridine-3'-phosphorothioate
  modified_base 3: mod_base = OTHER; note = 2'-O-methyluridine-3'-phosphate
  modified_base 4: mod_base = OTHER; note = 2'-O-methyluridine-3'-phosphate
  modified_base 5: mod_base = OTHER; note = 2'-O-methyluridine-3'-phosphate
  modified_base 6: mod_base = OTHER; note = 2'-deoxy-2'-fluorouridine-3'-phosphate
  modified_base 7: mod_base = OTHER; note = 2'-O-methylguanosine-3'-phosphate
  modified_base 8: mod_base = OTHER; note = 2'-O-methyluridine-3'-phosphate
  modified_base 9: mod_base = OTHER; note = 2'-O-methyluridine-3'-phosphate
  modified_base 10: mod_base = OTHER; note = 2'-O-methyladenosine-3'-phosphate
  modified_base 11: mod_base = OTHER; note = 2'-O-methyluridine-3'-phosphate
  modified_base 12: mod_base = OTHER; note = 2'-O-methyluridine-3'-phosphate
  modified_base 13: mod_base = OTHER; note = 2'-O-methyluridine-3'-phosphate
  modified_base 14: mod_base = OTHER; note = 2'-deoxy-2'-fluoroadenosine-3'-phosphate
  modified_base 15: mod_base = OTHER; note = 2'-O-methylguanosine-3'-phosphate
  modified_base 16: mod_base = OTHER; note = 2'-deoxy-2'-fluoroadenosine-3'-phosphate
  modified_base 17: mod_base = OTHER; note = 2'-O-methyladenosine-3'-phosphate
  modified_base 18: mod_base = OTHER; note = 2'-O-methylguanosine-3'-phosphate
  modified_base 19: mod_base = OTHER; note = 2'-O-methylcytidine-3'-phosphate
  modified_base 20: mod_base = OTHER; note = 2'-O-methyladenosine-3'-phosphate
  modified_base 21: mod_base = OTHER; note = 2'-O-methylguanosine-3'-phosphorothioate
  modified_base 22: mod_base = OTHER; note = 2'-O-methylcytidine-3'-phosphorothioate
  modified_base 23: mod_base = OTHER; note = 2'-O-methyluridine
ttttttgttatttagaagcagct

SEQ ID NO: 13082 - RNA, 23 nt, synthetic construct
  source 1..23: mol_type = other RNA
  modified_base 1: mod_base = OTHER; note = 2'-O-methyluridine-3'-phosphorothioate 5'-(E)-Vinylphosphonate
  modified_base 2: mod_base = OTHER; note = 2'-deoxy-2'-fluorouridine-3'-phosphorothioate
  modified_base 3: mod_base = OTHER; note = 2'-O-methyluridine-3'-phosphate
  modified_base 4: mod_base = OTHER; note = 2'-O-methyluridine-3'-phosphate
  modified_base 5: mod_base = OTHER; note = 2'-O-methyluridine-3'-phosphate
  modified_base 6: mod_base = OTHER; note = 2'-deoxy-2'-fluorouridine-3'-phosphate
  modified_base 7: mod_base = OTHER; note = 2'-O-methyluridine-3'-phosphate
  modified_base 8: mod_base = OTHER; note = 2'-O-methylguanosine-3'-phosphate
  modified_base 9: mod_base = OTHER; note = 2'-O-methyluridine-3'-phosphate
  modified_base 10: mod_base = OTHER; note = 2'-O-methyluridine-3'-phosphate
  modified_base 11: mod_base = OTHER; note = 2'-O-methyladenosine-3'-phosphate
  modified_base 12: mod_base = OTHER; note = 2'-O-methyluridine-3'-phosphate
  modified_base 13: mod_base = OTHER; note = 2'-O-methyluridine-3'-phosphate
  modified_base 14: mod_base = OTHER; note = 2'-deoxy-2'-fluorouridine-3'-phosphate
  modified_base 15: mod_base = OTHER; note = 2'-O-methyladenosine-3'-phosphate
  modified_base 16: mod_base = OTHER; note = 2'-deoxy-2'-fluoroguanosine-3'-phosphate
  modified_base 17: mod_base = OTHER; note = 2'-O-methyladenosine-3'-phosphate
  modified_base 18: mod_base = OTHER; note = 2'-O-methyladenosine-3'-phosphate
  modified_base 19: mod_base = OTHER; note = 2'-O-methylguanosine-3'-phosphate
  modified_base 20: mod_base = OTHER; note = 2'-O-methylcytidine-3'-phosphate
  modified_base 21: mod_base = OTHER; note = 2'-O-methyladenosine-3'-phosphorothioate
  modified_base 22: mod_base = OTHER; note = 2'-O-methylguanosine-3'-phosphorothioate
  modified_base 23: mod_base = OTHER; note = 2'-O-methylcytidine
tttttttgttatttagaagcagc

SEQ ID NO: 13083 - RNA, 23 nt, synthetic construct
  source 1..23: mol_type = other RNA
  modified_base 1: mod_base = OTHER; note = 2'-O-methyluridine-3'-phosphorothioate 5'-(E)-Vinylphosphonate
  modified_base 2: mod_base = OTHER; note = 2'-deoxy-2'-fluoroadenosine-3'-phosphorothioate
  modified_base 3: mod_base = OTHER; note = 2'-O-methyladenosine-3'-phosphate
  modified_base 4: mod_base = OTHER; note = 2'-O-methyluridine-3'-phosphate
  modified_base 5: mod_base = OTHER; note = 2'-O-methylguanosine-3'-phosphate
  modified_base 6: mod_base = OTHER; note = 2'-deoxy-2'-fluorouridine-3'-phosphate
  modified_base 7: mod_base = OTHER; note = 2'-O-methyluridine-3'-phosphate
  modified_base 8: mod_base = OTHER; note = 2'-O-methyluridine-3'-phosphate
  modified_base 9: mod_base = OTHER; note = 2'-O-methyluridine-3'-phosphate
  modified_base 10: mod_base = OTHER; note = 2'-O-methylguanosine-3'-phosphate
  modified_base 11: mod_base = OTHER; note = 2'-O-methyladenosine-3'-phosphate
  modified_base 12: mod_base = OTHER; note = 2'-O-methyladenosine-3'-phosphate
  modified_base 13: mod_base = OTHER; note = 2'-O-methyladenosine-3'-phosphate
  modified_base 14: mod_base = OTHER; note = 2'-deoxy-2'-fluoroadenosine-3'-phosphate
  modified_base 15: mod_base = OTHER; note = 2'-O-methyladenosine-3'-phosphate
  modified_base 16: mod_base = OTHER; note = 2'-deoxy-2'-fluorouridine-3'-phosphate
  modified_base 17: mod_base = OTHER; note = 2'-O-methylguanosine-3'-phosphate
  modified_base 18: mod_base = OTHER; note = 2'-O-methylcytidine-3'-phosphate
  modified_base 19: mod_base = OTHER; note = 2'-O-methylcytidine-3'-phosphate
  modified_base 20: mod_base = OTHER; note = 2'-O-methylcytidine-3'-phosphate
  modified_base 21: mod_base = OTHER; note = 2'-O-methyladenosine-3'-phosphorothioate
  modified_base 22: mod_base = OTHER; note = 2'-O-methyluridine-3'-phosphorothioate
  modified_base 23: mod_base = OTHER; note = 2'-O-methyladenosine
taatgttttgaaaaatgcccata

SEQ ID NO: 13084 - RNA, 23 nt, synthetic construct
  source 1..23: mol_type = other RNA
  modified_base 1: mod_base = OTHER; note = 2'-O-methyluridine-3'-phosphorothioate 5'-(E)-Vinylphosphonate
  modified_base 2: mod_base = OTHER; note = 2'-deoxy-2'-fluorocytidine-3'-phosphorothioate
  modified_base 3: mod_base = OTHER; note = 2'-O-methyladenosine-3'-phosphate
  modified_base 4: mod_base = OTHER; note = 2'-O-methyladenosine-3'-phosphate
  modified_base 5: mod_base = OTHER; note = 2'-O-methylguanosine-3'-phosphate
  modified_base 6: mod_base = OTHER; note = 2'-deoxy-2'-fluoroguanosine-3'-phosphate
  modified_base 7: mod_base = OTHER; note = 2'-O-methylcytidine-3'-phosphate
  modified_base 8: mod_base = OTHER; note = 2'-O-methyluridine-3'-phosphate
  modified_base 9: mod_base = OTHER; note = 2'-O-methyladenosine-3'-phosphate
  modified_base 10: mod_base = OTHER; note = 2'-O-methylguanosine-3'-phosphate
  modified_base 11: mod_base = OTHER; note = 2'-O-methyladenosine-3'-phosphate
  modified_base 12: mod_base = OTHER; note = 2'-O-methyluridine-3'-phosphate
  modified_base 13: mod_base = OTHER; note = 2'-O-methylguanosine-3'-phosphate
  modified_base 14: mod_base = OTHER; note = 2'-deoxy-2'-fluoroadenosine-3'-phosphate
  modified_base 15: mod_base = OTHER; note = 2'-O-methyladenosine-3'-phosphate
  modified_base 16: mod_base = OTHER; note = 2'-deoxy-2'-fluoroadenosine-3'-phosphate
  modified_base 17: mod_base = OTHER; note = 2'-O-methyladenosine-3'-phosphate
  modified_base 18: mod_base = OTHER; note = 2'-O-methyladenosine-3'-phosphate
  modified_base 19: mod_base = OTHER; note = 2'-O-methyladenosine-3'-phosphate
  modified_base 20: mod_base = OTHER; note = 2'-O-methyladenosine-3'-phosphate
  modified_base 21: mod_base = OTHER; note = 2'-O-methylguanosine-3'-phosphorothioate
  modified_base 22: mod_base = OTHER; note = 2'-O-methyladenosine-3'-phosphorothioate
  modified_base 23: mod_base = OTHER; note = 2'-O-methyladenosine
tcaaggctagatgaaaaaaagaa

SEQ ID NO: 13085 - RNA, 23 nt, synthetic construct
  source 1..23: mol_type = other RNA
  modified_base 1: mod_base = OTHER; note = 2'-O-methyluridine-3'-phosphorothioate 5'-(E)-Vinylphosphonate
  modified_base 2: mod_base = OTHER; note = 2'-deoxy-2'-fluorocytidine-3'-phosphorothioate
  modified_base 3: mod_base = OTHER; note = 2'-O-methyluridine-3'-phosphate
  modified_base 4: mod_base = OTHER; note = 2'-O-methyladenosine-3'-phosphate
  modified_base 5: mod_base = OTHER; note = 2'-O-methylguanosine-3'-phosphate
  modified_base 6: mod_base = OTHER; note = 2'-deoxy-2'-fluoroadenosine-3'-phosphate
  modified_base 7: mod_base = OTHER; note = 2'-O-methyluridine-3'-phosphate
  modified_base 8: mod_base = OTHER; note = 2'-O-methylguanosine-3'-phosphate
  modified_base 9: mod_base = OTHER; note = 2'-O-methyladenosine-3'-phosphate
  modified_base 10: mod_base = OTHER; note = 2'-O-methyladenosine-3'-phosphate
  modified_base 11: mod_base = OTHER; note = 2'-O-methyladenosine-3'-phosphate
  modified_base 12: mod_base = OTHER; note = 2'-O-methyladenosine-3'-phosphate
  modified_base 13: mod_base = OTHER; note = 2'-O-methyladenosine-3'-phosphate
  modified_base 14: mod_base = OTHER; note = 2'-deoxy-2'-fluoroadenosine-3'-phosphate
  modified_base 15: mod_base = OTHER; note = 2'-O-methyladenosine-3'-phosphate
  modified_base 16: mod_base = OTHER; note = 2'-deoxy-2'-fluoroguanosine-3'-phosphate
  modified_base 17: mod_base = OTHER; note = 2'-O-methyladenosine-3'-phosphate
  modified_base 18: mod_base = OTHER; note = 2'-O-methyladenosine-3'-phosphate
  modified_base 19: mod_base = OTHER; note = 2'-O-methyladenosine-3'-phosphate
  modified_base 20: mod_base = OTHER; note = 2'-O-methylguanosine-3'-phosphate
  modified_base 21: mod_base = OTHER; note = 2'-O-methyluridine-3'-phosphorothioate
  modified_base 22: mod_base = OTHER; note = 2'-O-methylcytidine-3'-phosphorothioate
  modified_base 23: mod_base = OTHER; note = 2'-O-methyladenosine
tctagatgaaaaaaagaaagtca

SEQ ID NO: 13086 - RNA, 23 nt, synthetic construct
  source 1..23: mol_type = other RNA
  modified_base 1: mod_base = OTHER; note = 2'-O-methyluridine-3'-phosphorothioate 5'-(E)-Vinylphosphonate
  modified_base 2: mod_base = OTHER; note = 2'-deoxy-2'-fluoroguanosine-3'-phosphorothioate
  modified_base 3: mod_base = OTHER; note = 2'-O-methylcytidine-3'-phosphate
  modified_base 4: mod_base = OTHER; note = 2'-O-methyluridine-3'-phosphate
  modified_base 5: mod_base = OTHER; note = 2'-O-methyladenosine-3'-phosphate
  modified_base 6: mod_base = OTHER; note = 2'-deoxy-2'-fluoroguanosine-3'-phosphate
  modified_base 7: mod_base = OTHER; note = 2'-O-methyladenosine-3'-phosphate
  modified_base 8: mod_base = OTHER; note = 2'-O-methyluridine-3'-phosphate
  modified_base 9: mod_base = OTHER; note = 2'-O-methylguanosine-3'-phosphate
  modified_base 10: mod_base = OTHER; note = 2'-O-methyladenosine-3'-phosphate
  modified_base 11: mod_base = OTHER; note = 2'-O-methyladenosine-3'-phosphate
  modified_base 12: mod_base = OTHER; note = 2'-O-methyladenosine-3'-phosphate
  modified_base 13: mod_base = OTHER; note = 2'-O-methyladenosine-3'-phosphate
  modified_base 14: mod_base = OTHER; note = 2'-deoxy-2'-fluoroadenosine-3'-phosphate
  modified_base 15: mod_base = OTHER; note = 2'-O-methyladenosine-3'-phosphate
  modified_base 16: mod_base = OTHER; note = 2'-deoxy-2'-fluoroadenosine-3'-phosphate
  modified_base 17: mod_base = OTHER; note = 2'-O-methylguanosine-3'-phosphate
  modified_base 18: mod_base = OTHER; note = 2'-O-methyladenosine-3'-phosphate
  modified_base 19: mod_base = OTHER; note = 2'-O-methyladenosine-3'-phosphate
  modified_base 20: mod_base = OTHER; note = 2'-O-methyladenosine-3'-phosphate
  modified_base 21: mod_base = OTHER; note = 2'-O-methylguanosine-3'-phosphorothioate
  modified_base 22: mod_base = OTHER; note = 2'-O-methyluridine-3'-phosphorothioate
  modified_base 23: mod_base = OTHER; note = 2'-O-methylcytidine
tgctagatgaaaaaaagaaagtc

SEQ ID NO: 13087 - RNA, 23 nt, synthetic construct
  source 1..23: mol_type = other RNA
  modified_base 1: mod_base = OTHER; note = 2'-O-methyluridine-3'-phosphorothioate 5'-(E)-Vinylphosphonate
  modified_base 2: mod_base = OTHER; note = 2'-deoxy-2'-fluoroguanosine-3'-phosphorothioate
  modified_base 3: mod_base = OTHER; note = 2'-O-methylguanosine-3'-phosphate
  modified_base 4: mod_base = OTHER; note = 2'-O-methylcytidine-3'-phosphate
  modified_base 5: mod_base = OTHER; note = 2'-O-methyluridine-3'-phosphate
  modified_base 6: mod_base = OTHER; note = 2'-deoxy-2'-fluoroadenosine-3'-phosphate
  modified_base 7: mod_base = OTHER; note = 2'-O-methylguanosine-3'-phosphate
  modified_base 8: mod_base = OTHER; note = 2'-O-methyladenosine-3'-phosphate
  modified_base 9: mod_base = OTHER; note = 2'-O-methyluridine-3'-phosphate
  modified_base 10: mod_base = OTHER; note = 2'-O-methylguanosine-3'-phosphate
  modified_base 11: mod_base = OTHER; note = 2'-O-methyladenosine-3'-phosphate
  modified_base 12: mod_base = OTHER; note = 2'-O-methyladenosine-3'-phosphate
  modified_base 13: mod_base = OTHER; note = 2'-O-methyladenosine-3'-phosphate
  modified_base 14: mod_base = OTHER; note = 2'-deoxy-2'-fluoroadenosine-3'-phosphate
  modified_base 15: mod_base = OTHER; note = 2'-O-methyladenosine-3'-phosphate
  modified_base 16: mod_base = OTHER; note = 2'-deoxy-2'-fluoroadenosine-3'-phosphate
  modified_base 17: mod_base = OTHER; note = 2'-O-methyladenosine-3'-phosphate
  modified_base 18: mod_base = OTHER; note = 2'-O-methylguanosine-3'-phosphate
  modified_base 19: mod_base = OTHER; note = 2'-O-methyladenosine-3'-phosphate
  modified_base 20: mod_base = OTHER; note = 2'-O-methyladenosine-3'-phosphate
  modified_base 21: mod_base = OTHER; note = 2'-O-methyladenosine-3'-phosphorothioate
  modified_base 22: mod_base = OTHER; note = 2'-O-methylguanosine-3'-phosphorothioate
  modified_base 23: mod_base = OTHER; note = 2'-O-methyluridine
tggctagatgaaaaaaagaaagt

SEQ ID NO: 13088 - RNA, 23 nt, synthetic construct
  source 1..23: mol_type = other RNA
  modified_base 1: mod_base = OTHER; note = 2'-O-methyluridine-3'-phosphorothioate 5'-(E)-Vinylphosphonate
  modified_base 2: mod_base = OTHER; note = 2'-deoxy-2'-fluoroadenosine-3'-phosphorothioate
  modified_base 3: mod_base = OTHER; note = 2'-O-methylguanosine-3'-phosphate
  modified_base 4: mod_base = OTHER; note = 2'-O-methylguanosine-3'-phosphate
  modified_base 5: mod_base = OTHER; note = 2'-O-methylcytidine-3'-phosphate
  modified_base 6: mod_base = OTHER; note = 2'-deoxy-2'-fluorouridine-3'-phosphate
  modified_base 7: mod_base = OTHER; note = 2'-O-methyladenosine-3'-phosphate
  modified_base 8: mod_base = OTHER; note = 2'-O-methylguanosine-3'-phosphate
  modified_base 9: mod_base = OTHER; note = 2'-O-methyladenosine-3'-phosphate
  modified_base 10: mod_base = OTHER; note = 2'-O-methyluridine-3'-phosphate
  modified_base 11: mod_base = OTHER; note = 2'-O-methylguanosine-3'-phosphate
  modified_base 12: mod_base = OTHER; note = 2'-O-methyladenosine-3'-phosphate
  modified_base 13: mod_base = OTHER; note = 2'-O-methyladenosine-3'-phosphate
  modified_base 14: mod_base = OTHER; note = 2'-deoxy-2'-fluoroadenosine-3'-phosphate
  modified_base 15: mod_base = OTHER; note = 2'-O-methyladenosine-3'-phosphate
  modified_base 16: mod_base = OTHER; note = 2'-deoxy-2'-fluoroadenosine-3'-phosphate
  modified_base 17: mod_base = OTHER; note = 2'-O-methyladenosine-3'-phosphate
  modified_base 18: mod_base = OTHER; note = 2'-O-methyladenosine-3'-phosphate
  modified_base 19: mod_base = OTHER; note = 2'-O-methylguanosine-3'-phosphate
  modified_base 20: mod_base = OTHER; note = 2'-O-methyladenosine-3'-phosphate
  modified_base 21: mod_base = OTHER; note = 2'-O-methyladenosine-3'-phosphorothioate
  modified_base 22: mod_base = OTHER; note = 2'-O-methyladenosine-3'-phosphorothioate
  modified_base 23: mod_base = OTHER; note = 2'-O-methylguanosine
taggctagatgaaaaaaagaaag

SEQ ID NO: 13089 - RNA, 23 nt, synthetic construct
  source 1..23: mol_type = other RNA
  modified_base 1: mod_base = OTHER; note = 2'-O-methyluridine-3'-phosphorothioate 5'-(E)-Vinylphosphonate
  modified_base 2: mod_base = OTHER; note = 2'-deoxy-2'-fluoroadenosine-3'-phosphorothioate
  modified_base 3: mod_base = OTHER; note = 2'-O-methyladenosine-3'-phosphate
  modified_base 4: mod_base = OTHER; note = 2'-O-methylguanosine-3'-phosphate
  modified_base 5: mod_base = OTHER; note = 2'-O-methylguanosine-3'-phosphate
  modified_base 6: mod_base = OTHER; note = 2'-deoxy-2'-fluorocytidine-3'-phosphate
  modified_base 7: mod_base = OTHER; note = 2'-O-methyluridine-3'-phosphate
  modified_base 8: mod_base = OTHER; note = 2'-O-methyladenosine-3'-phosphate
  modified_base 9: mod_base = OTHER; note = 2'-O-methylguanosine-3'-phosphate
  modified_base 10: mod_base = OTHER; note = 2'-O-methyladenosine-3'-phosphate
  modified_base 11: mod_base = OTHER; note = 2'-O-methyluridine-3'-phosphate
  modified_base 12: mod_base = OTHER; note = 2'-O-methylguanosine-3'-phosphate
  modified_base 13: mod_base = OTHER; note = 2'-O-methyladenosine-3'-phosphate
  modified_base 14: mod_base = OTHER; note = 2'-deoxy-2'-fluoroadenosine-3'-phosphate
  modified_base 15: mod_base = OTHER; note = 2'-O-methyladenosine-3'-phosphate
  modified_base 16: mod_base = OTHER; note = 2'-deoxy-2'-fluoroadenosine-3'-phosphate
  modified_base 17: mod_base = OTHER; note = 2'-O-methyladenosine-3'-phosphate
  modified_base 18: mod_base = OTHER; note = 2'-O-methyladenosine-3'-phosphate
  modified_base 19: mod_base = OTHER; note = 2'-O-methyladenosine-3'-phosphate
  modified_base 20: mod_base = OTHER; note = 2'-O-methylguanosine-3'-phosphate
  modified_base 21: mod_base = OTHER; note = 2'-O-methyladenosine-3'-phosphorothioate
  modified_base 22: mod_base = OTHER; note = 2'-O-methyladenosine-3'-phosphorothioate
  modified_base 23: mod_base = OTHER; note = 2'-O-methyladenosine
taaggctagatgaaaaaaagaaa

SEQ ID NO: 13090 - RNA, 23 nt, synthetic construct
  source 1..23: mol_type = other RNA
  modified_base 1: mod_base = OTHER; note = 2'-O-methyluridine-3'-phosphorothioate 5'-(E)-Vinylphosphonate
  modified_base 2: mod_base = OTHER; note = 2'-deoxy-2'-fluoroguanosine-3'-phosphorothioate
  modified_base 3: mod_base = OTHER; note = 2'-O-methylcytidine-3'-phosphate
  modified_base 4: mod_base = OTHER; note = 2'-O-methyladenosine-3'-phosphate
  modified_base 5: mod_base = OTHER; note = 2'-O-methyladenosine-3'-phosphate
  modified_base 6: mod_base = OTHER; note = 2'-deoxy-2'-fluoroguanosine-3'-phosphate
  modified_base 7: mod_base = OTHER; note = 2'-O-methylguanosine-3'-phosphate
  modified_base 8: mod_base = OTHER; note = 2'-O-methylcytidine-3'-phosphate
  modified_base 9: mod_base = OTHER; note = 2'-O-methyluridine-3'-phosphate
  modified_base 10: mod_base = OTHER; note = 2'-O-methyladenosine-3'-phosphate
  modified_base 11: mod_base = OTHER; note = 2'-O-methylguanosine-3'-phosphate
  modified_base 12: mod_base = OTHER; note = 2'-O-methyladenosine-3'-phosphate
  modified_base 13: mod_base = OTHER; note = 2'-O-methyluridine-3'-phosphate
  modified_base 14: mod_base = OTHER; note = 2'-deoxy-2'-fluoroguanosine-3'-phosphate
  modified_base 15: mod_base = OTHER; note = 2'-O-methyladenosine-3'-phosphate
  modified_base 16: mod_base = OTHER; note = 2'-deoxy-2'-fluoroadenosine-3'-phosphate
  modified_base 17: mod_base = OTHER; note = 2'-O-methyladenosine-3'-phosphate
  modified_base 18: mod_base = OTHER; note = 2'-O-methyladenosine-3'-phosphate
  modified_base 19: mod_base = OTHER; note = 2'-O-methyladenosine-3'-phosphate
  modified_base 20: mod_base = OTHER; note = 2'-O-methyladenosine-3'-phosphate
  modified_base 21: mod_base = OTHER; note = 2'-O-methyladenosine-3'-phosphorothioate
  modified_base 22: mod_base = OTHER; note = 2'-O-methylguanosine-3'-phosphorothioate
  modified_base 23: mod_base = OTHER; note = 2'-O-methyladenosine
tgcaaggctagatgaaaaaaaga

SEQ ID NO: 13091 - RNA, 23 nt, synthetic construct
  source 1..23: mol_type = other RNA
  modified_base 1: mod_base = OTHER; note = 2'-O-methyluridine-3'-phosphorothioate 5'-(E)-Vinylphosphonate
  modified_base 2: mod_base = OTHER; note = 2'-deoxy-2'-fluoroadenosine-3'-phosphorothioate
  modified_base 3: mod_base = OTHER; note = 2'-O-methylguanosine-3'-phosphate
  modified_base 4: mod_base = OTHER; note = 2'-O-methylcytidine-3'-phosphate
  modified_base 5: mod_base = OTHER; note = 2'-O-methyladenosine-3'-phosphate
  modified_base 6: mod_base = OTHER; note = 2'-deoxy-2'-fluoroadenosine-3'-phosphate
  modified_base 7: mod_base = OTHER; note = 2'-O-methylguanosine-3'-phosphate
  modified_base 8: mod_base = OTHER; note = 2'-O-methylguanosine-3'-phosphate
  modified_base 9: mod_base = OTHER; note = 2'-O-methylcytidine-3'-phosphate
  modified_base 10: mod_base = OTHER; note = 2'-O-methyluridine-3'-phosphate
  modified_base 11: mod_base = OTHER; note = 2'-O-methyladenosine-3'-phosphate
  modified_base 12: mod_base = OTHER; note = 2'-O-methylguanosine-3'-phosphate
  modified_base 13: mod_base = OTHER; note = 2'-O-methyladenosine-3'-phosphate
  modified_base 14: mod_base = OTHER; note = 2'-deoxy-2'-fluorouridine-3'-phosphate
  modified_base 15: mod_base = OTHER; note = 2'-O-methylguanosine-3'-phosphate
  modified_base 16: mod_base = OTHER; note = 2'-deoxy-2'-fluoroadenosine-3'-phosphate
  modified_base 17: mod_base = OTHER; note = 2'-O-methyladenosine-3'-phosphate
  modified_base 18: mod_base = OTHER; note = 2'-O-methyladenosine-3'-phosphate
  modified_base 19: mod_base = OTHER; note = 2'-O-methyladenosine-3'-phosphate
  modified_base 20: mod_base = OTHER; note = 2'-O-methyladenosine-3'-phosphate
  modified_base 21: mod_base = OTHER; note = 2'-O-methyladenosine-3'-phosphorothioate
  modified_base 22: mod_base = OTHER; note = 2'-O-methyladenosine-3'-phosphorothioate
  modified_base 23: mod_base = OTHER; note = 2'-O-methylguanosine
tagcaaggctagatgaaaaaaag

SEQ ID NO: 13092 - RNA, 23 nt, synthetic construct
  source 1..23: mol_type = other RNA
  modified_base 1: mod_base = OTHER; note = 2'-O-methyluridine-3'-phosphorothioate 5'-(E)-Vinylphosphonate
  modified_base 2: mod_base = OTHER; note = 2'-deoxy-2'-fluoroadenosine-3'-phosphorothioate
  modified_base 3: mod_base = OTHER; note = 2'-O-methyladenosine-3'-phosphate
  modified_base 4: mod_base = OTHER; note = 2'-O-methylguanosine-3'-phosphate
  modified_base 5: mod_base = OTHER; note = 2'-O-methylcytidine-3'-phosphate
  modified_base 6: mod_base = OTHER; note = 2'-deoxy-2'-fluoroadenosine-3'-phosphate
  modified_base 7: mod_base = OTHER; note = 2'-O-methyladenosine-3'-phosphate
  modified_base 8: mod_base = OTHER; note = 2'-O-methylguanosine-3'-phosphate
  modified_base 9: mod_base = OTHER; note = 2'-O-methylguanosine-3'-phosphate
  modified_base 10: mod_base = OTHER; note = 2'-O-methylcytidine-3'-phosphate
  modified_base 11: mod_base = OTHER; note = 2'-O-methyluridine-3'-phosphate
  modified_base 12: mod_base = OTHER; note = 2'-O-methyladenosine-3'-phosphate
  modified_base 13: mod_base = OTHER; note = 2'-O-methylguanosine-3'-phosphate
  modified_base 14: mod_base = OTHER; note = 2'-deoxy-2'-fluoroadenosine-3'-phosphate
  modified_base 15: mod_base = OTHER; note = 2'-O-methyluridine-3'-phosphate
  modified_base 16: mod_base = OTHER; note = 2'-deoxy-2'-fluoroguanosine-3'-phosphate
  modified_base 17: mod_base = OTHER; note = 2'-O-methyladenosine-3'-phosphate
  modified_base 18: mod_base = OTHER; note = 2'-O-methyladenosine-3'-phosphate
  modified_base 19: mod_base = OTHER; note = 2'-O-methyladenosine-3'-phosphate
  modified_base 20: mod_base = OTHER; note = 2'-O-methyladenosine-3'-phosphate
  modified_base 21: mod_base = OTHER; note = 2'-O-methyladenosine-3'-phosphorothioate
  modified_base 22: mod_base = OTHER; note = 2'-O-methyladenosine-3'-phosphorothioate
  modified_base 23: mod_base = OTHER; note = 2'-O-methyladenosine
taagcaaggctagatgaaaaaaa

SEQ ID NO: 13093 - RNA, 23 nt, synthetic construct
  source 1..23: mol_type = other RNA
  modified_base 1: mod_base = OTHER; note = 2'-O-methyluridine-3'-phosphorothioate 5'-(E)-Vinylphosphonate
  modified_base 2: mod_base = OTHER; note = 2'-deoxy-2'-fluoroadenosine-3'-phosphorothioate
  modified_base 3: mod_base = OTHER; note = 2'-O-methyladenosine-3'-phosphate
  modified_base 4: mod_base = OTHER; note = 2'-O-methyladenosine-3'-phosphate
  modified_base 5: mod_base = OTHER; note = 2'-O-methylguanosine-3'-phosphate
  modified_base 6: mod_base = OTHER; note = 2'-deoxy-2'-fluorocytidine-3'-phosphate
  modified_base 7: mod_base = OTHER; note = 2'-O-methyladenosine-3'-phosphate
  modified_base 8: mod_base = OTHER; note = 2'-O-methyladenosine-3'-phosphate
  modified_base 9: mod_base = OTHER; note = 2'-O-methylguanosine-3'-phosphate
  modified_base 10: mod_base = OTHER; note = 2'-O-methylguanosine-3'-phosphate
  modified_base 11: mod_base = OTHER; note = 2'-O-methylcytidine-3'-phosphate
  modified_base 12: mod_base = OTHER; note = 2'-O-methyluridine-3'-phosphate
  modified_base 13: mod_base = OTHER; note = 2'-O-methyladenosine-3'-phosphate
  modified_base 14: mod_base = OTHER; note = 2'-deoxy-2'-fluoroguanosine-3'-phosphate
  modified_base 15: mod_base = OTHER; note = 2'-O-methyladenosine-3'-phosphate
  modified_base 16: mod_base = OTHER; note = 2'-deoxy-2'-fluorouridine-3'-phosphate
  modified_base 17: mod_base = OTHER; note = 2'-O-methylguanosine-3'-phosphate
  modified_base 18: mod_base = OTHER; note = 2'-O-methyladenosine-3'-phosphate
  modified_base 19: mod_base = OTHER; note = 2'-O-methyladenosine-3'-phosphate
  modified_base 20: mod_base = OTHER; note = 2'-O-methyladenosine-3'-phosphate
  modified_base 21: mod_base = OTHER; note = 2'-O-methyladenosine-3'-phosphorothioate
  modified_base 22: mod_base = OTHER; note = 2'-O-methyladenosine-3'-phosphorothioate
  modified_base 23: mod_base = OTHER; note = 2'-O-methyladenosine
taaagcaaggctagatgaaaaaa

SEQ ID NO: 13094 - RNA, 23 nt, synthetic construct
  source 1..23: mol_type = other RNA
  modified_base 1: mod_base = OTHER; note = 2'-O-methyluridine-3'-phosphorothioate 5'-(E)-Vinylphosphonate
  modified_base 2: mod_base = OTHER; note = 2'-deoxy-2'-fluoroadenosine-3'-phosphorothioate
  modified_base 3: mod_base = OTHER; note = 2'-O-methyluridine-3'-phosphate
  modified_base 4: mod_base = OTHER; note = 2'-O-methyladenosine-3'-phosphate
  modified_base 5: mod_base = OTHER; note = 2'-O-methyladenosine-3'-phosphate
  modified_base 6: mod_base = OTHER; note = 2'-deoxy-2'-fluoroadenosine-3'-phosphate
  modified_base 7: mod_base = OTHER; note = 2'-O-methylguanosine-3'-phosphate
  modified_base 8: mod_base = OTHER; note = 2'-O-methylcytidine-3'-phosphate
  modified_base 9: mod_base = OTHER; note = 2'-O-methyladenosine-3'-phosphate
  modified_base 10: mod_base = OTHER; note = 2'-O-methyladenosine-3'-phosphate
  modified_base 11: mod_base = OTHER; note = 2'-O-methylguanosine-3'-phosphate
  modified_base 12: mod_base = OTHER; note = 2'-O-methylguanosine-3'-phosphate
  modified_base 13: mod_base = OTHER; note = 2'-O-methylcytidine-3'-phosphate
  modified_base 14: mod_base = OTHER; note = 2'-deoxy-2'-fluorouridine-3'-phosphate
  modified_base 15: mod_base = OTHER; note = 2'-O-methyladenosine-3'-phosphate
  modified_base 16: mod_base = OTHER; note = 2'-deoxy-2'-fluoroguanosine-3'-phosphate
  modified_base 17: mod_base = OTHER; note = 2'-O-methyladenosine-3'-phosphate
  modified_base 18: mod_base = OTHER; note = 2'-O-methyluridine-3'-phosphate
  modified_base 19: mod_base = OTHER; note = 2'-O-methylguanosine-3'-phosphate
  modified_base 20: mod_base = OTHER; note = 2'-O-methyladenosine-3'-phosphate
  modified_base 21: mod_base = OTHER; note = 2'-O-methyladenosine-3'-phosphorothioate
  modified_base 22: mod_base = OTHER; note = 2'-O-methyladenosine-3'-phosphorothioate
  modified_base 23: mod_base = OTHER; note = 2'-O-methyladenosine
tataaagcaaggctagatgaaaa

SEQ ID NO: 13095 - RNA, 23 nt, synthetic construct
  source 1..23: mol_type = other RNA
  modified_base 1: mod_base = OTHER; note = 2'-O-methyluridine-3'-phosphorothioate 5'-(E)-Vinylphosphonate
  modified_base 2: mod_base = OTHER; note = 2'-deoxy-2'-fluoroadenosine-3'-phosphorothioate
  modified_base 3: mod_base = OTHER; note = 2'-O-methyladenosine-3'-phosphate
  modified_base 4: mod_base = OTHER; note = 2'-O-methyluridine-3'-phosphate
  modified_base 5: mod_base = OTHER; note = 2'-O-methylcytidine-3'-phosphate
  modified_base 6: mod_base = OTHER; note = 2'-deoxy-2'-fluorouridine-3'-phosphate
  modified_base 7: mod_base = OTHER; note = 2'-O-methylcytidine-3'-phosphate
  modified_base 8: mod_base = OTHER; note = 2'-O-methyluridine-3'-phosphate
  modified_base 9: mod_base = OTHER; note = 2'-O-methylguanosine-3'-phosphate
  modified_base 10: mod_base = OTHER; note = 2'-O-methyladenosine-3'-phosphate
  modified_base 11: mod_base = OTHER; note = 2'-O-methylguanosine-3'-phosphate
  modified_base 12: mod_base = OTHER; note = 2'-O-methyladenosine-3'-phosphate
  modified_base 13: mod_base = OTHER; note = 2'-O-methylguanosine-3'-phosphate
  modified_base 14: mod_base = OTHER; note = 2'-deoxy-2'-fluorouridine-3'-phosphate
  modified_base 15: mod_base = OTHER; note = 2'-O-methyladenosine-3'-phosphate
  modified_base 16: mod_base = OTHER; note = 2'-deoxy-2'-fluorocytidine-3'-phosphate
  modified_base 17: mod_base = OTHER; note = 2'-O-methyluridine-3'-phosphate
  modified_base 18: mod_base = OTHER; note = 2'-O-methyladenosine-3'-phosphate
  modified_base 19: mod_base = OTHER; note = 2'-O-methyladenosine-3'-phosphate
  modified_base 20: mod_base = OTHER; note = 2'-O-methylguanosine-3'-phosphate
  modified_base 21: mod_base = OTHER; note = 2'-O-methylguanosine-3'-phosphorothioate
  modified_base 22: mod_base = OTHER; note = 2'-O-methylguanosine-3'-phosphorothioate
  modified_base 23: mod_base = OTHER; note = 2'-O-methyladenosine
taatctctgagagtactaaggga

SEQ ID NO: 13096 - RNA, 23 nt, synthetic construct
  source 1..23: mol_type = other RNA
  modified_base 1: mod_base = OTHER; note = 2'-O-methyluridine-3'-phosphorothioate 5'-(E)-Vinylphosphonate
  modified_base 2: mod_base = OTHER; note = 2'-deoxy-2'-fluorouridine-3'-phosphorothioate
  modified_base 3: mod_base = OTHER; note = 2'-O-methyluridine-3'-phosphate
  modified_base 4: mod_base = OTHER; note = 2'-O-methyladenosine-3'-phosphate
  modified_base 5: mod_base = OTHER; note = 2'-O-methyluridine-3'-phosphate
  modified_base 6: mod_base = OTHER; note = 2'-deoxy-2'-fluoroadenosine-3'-phosphate
  modified_base 7: mod_base = OTHER; note = 2'-O-methyluridine-3'-phosphate
  modified_base 8: mod_base = OTHER; note = 2'-O-methyladenosine-3'-phosphate
  modified_base 9: mod_base = OTHER; note = 2'-O-methyladenosine-3'-phosphate
  modified_base 10: mod_base = OTHER; note = 2'-O-methyluridine-3'-phosphate
  modified_base 11: mod_base = OTHER; note = 2'-O-methylcytidine-3'-phosphate
  modified_base 12: mod_base = OTHER; note = 2'-O-methyluridine-3'-phosphate
  modified_base 13: mod_base = OTHER; note = 2'-O-methylcytidine-3'-phosphate
  modified_base 14: mod_base = OTHER; note = 2'-deoxy-2'-fluorouridine-3'-phosphate
  modified_base 15: mod_base = OTHER; note = 2'-O-methylguanosine-3'-phosphate
  modified_base 16: mod_base = OTHER; note = 2'-deoxy-2'-fluoroadenosine-3'-phosphate
  modified_base 17: mod_base = OTHER; note = 2'-O-methylguanosine-3'-phosphate
  modified_base 18: mod_base = OTHER; note = 2'-O-methyladenosine-3'-phosphate
  modified_base 19: mod_base = OTHER; note = 2'-O-methylguanosine-3'-phosphate
  modified_base 20: mod_base = OTHER; note = 2'-O-methyluridine-3'-phosphate
  modified_base 21: mod_base = OTHER; note = 2'-O-methyladenosine-3'-phosphorothioate
  modified_base 22: mod_base = OTHER; note = 2'-O-methylcytidine-3'-phosphorothioate
  modified_base 23: mod_base = OTHER; note = 2'-O-methyluridine
tttatataatctctgagagtact

SEQ ID NO: 13097 - RNA, 23 nt, synthetic construct
  source 1..23: mol_type = other RNA
  modified_base 1: mod_base = OTHER; note = 2'-O-methyluridine-3'-phosphorothioate 5'-(E)-Vinylphosphonate
  modified_base 2: mod_base = OTHER; note = 2'-deoxy-2'-fluorouridine-3'-phosphorothioate
  modified_base 3: mod_base = OTHER; note = 2'-O-methyluridine-3'-phosphate
  modified_base 4: mod_base = OTHER; note = 2'-O-methyluridine-3'-phosphate
  modified_base 5: mod_base = OTHER; note = 2'-O-methyladenosine-3'-phosphate
  modified_base 6: mod_base = OTHER; note = 2'-deoxy-2'-fluorouridine-3'-phosphate
  modified_base 7: mod_base = OTHER; note = 2'-O-methyladenosine-3'-phosphate
  modified_base 8: mod_base = OTHER; note = 2'-O-methyluridine-3'-phosphate
  modified_base 9: mod_base = OTHER; note = 2'-O-methyladenosine-3'-phosphate
  modified_base 10: mod_base = OTHER; note = 2'-O-methyladenosine-3'-phosphate
  modified_base 11: mod_base = OTHER; note = 2'-O-methyluridine-3'-phosphate
  modified_base 12: mod_base = OTHER; note = 2'-O-methylcytidine-3'-phosphate
  modified_base 13: mod_base = OTHER; note = 2'-O-methyluridine-3'-phosphate
  modified_base 14: mod_base = OTHER; note = 2'-deoxy-2'-fluorocytidine-3'-phosphate
  modified_base 15: mod_base = OTHER; note = 2'-O-methyluridine-3'-phosphate
  modified_base 16: mod_base = OTHER; note = 2'-deoxy-2'-fluoroguanosine-3'-phosphate
  modified_base 17: mod_base = OTHER; note = 2'-O-methyladenosine-3'-phosphate
  modified_base 18: mod_base = OTHER; note = 2'-O-methylguanosine-3'-phosphate
  modified_base 19: mod_base = OTHER; note = 2'-O-methyladenosine-3'-phosphate
  modified_base 20: mod_base = OTHER; note = 2'-O-methylguanosine-3'-phosphate
  modified_base 21: mod_base = OTHER; note = 2'-O-methyluridine-3'-phosphorothioate
  modified_base 22: mod_base = OTHER; note = 2'-O-methyladenosine-3'-phosphorothioate
  modified_base 23: mod_base = OTHER; note = 2'-O-methylcytidine
ttttatataatctctgagagtac

SEQ ID NO: 13098 - RNA, 23 nt, synthetic construct
  source 1..23: mol_type = other RNA
  modified_base 1: mod_base = OTHER; note = 2'-O-methyluridine-3'-phosphorothioate 5'-(E)-Vinylphosphonate
  modified_base 2: mod_base = OTHER; note = 2'-deoxy-2'-fluorouridine-3'-phosphorothioate
  modified_base 3: mod_base = OTHER; note = 2'-O-methyladenosine-3'-phosphate
  modified_base 4: mod_base = OTHER; note = 2'-O-methyladenosine-3'-phosphate
  modified_base 5: mod_base = OTHER; note = 2'-O-methylguanosine-3'-phosphate
  modified_base 6: mod_base = OTHER; note = 2'-deoxy-2'-fluoroadenosine-3'-phosphate
  modified_base 7: mod_base = OTHER; note = 2'-O-methylguanosine-3'-phosphate
  modified_base 8: mod_base = OTHER; note = 2'-O-methyluridine-3'-phosphate
  modified_base 9: mod_base = OTHER; note = 2'-O-methyluridine-3'-phosphate
  modified_base 10: mod_base = OTHER; note = 2'-O-methylcytidine-3'-phosphate
  modified_base 11: mod_base = OTHER; note = 2'-O-methyluridine-3'-phosphate
  modified_base 12: mod_base = OTHER; note = 2'-O-methylguanosine-3'-phosphate
  modified_base 13: mod_base = OTHER; note = 2'-O-methylcytidine-3'-phosphate
  modified_base 14: mod_base = OTHER; note = 2'-deoxy-2'-fluorouridine-3'-phosphate
  modified_base 15: mod_base = OTHER; note = 2'-O-methyladenosine-3'-phosphate
  modified_base 16: mod_base = OTHER; note = 2'-deoxy-2'-fluoroguanosine-3'-phosphate
  modified_base 17: mod_base = OTHER; note = 2'-O-methyluridine-3'-phosphate
  modified_base 18: mod_base = OTHER; note = 2'-O-methyladenosine-3'-phosphate
  modified_base 19: mod_base = OTHER; note = 2'-O-methyladenosine-3'-phosphate
  modified_base 20: mod_base = OTHER; note = 2'-O-methylcytidine-3'-phosphate
  modified_base 21: mod_base = OTHER; note = 2'-O-methyluridine-3'-phosphorothioate
  modified_base 22: mod_base = OTHER; note = 2'-O-methyladenosine-3'-phosphorothioate
  modified_base 23: mod_base = OTHER; note = 2'-O-methylguanosine
ttaagagttctgctagtaactag

SEQ ID NO: 13099 - RNA, 23 nt, synthetic construct
  source 1..23: mol_type = other RNA
  modified_base 1: mod_base = OTHER; note = 2'-O-methyluridine-3'-phosphorothioate 5'-(E)-Vinylphosphonate
  modified_base 2: mod_base = OTHER; note = 2'-deoxy-2'-fluorouridine-3'-phosphorothioate
  modified_base 3: mod_base = OTHER; note = 2'-O-methyladenosine-3'-phosphate
  modified_base 4: mod_base = OTHER; note = 2'-O-methyluridine-3'-phosphate
  modified_base 5: mod_base = OTHER; note = 2'-O-methylguanosine-3'-phosphate
  modified_base 6: mod_base = OTHER; note = 2'-deoxy-2'-fluoroguanosine-3'-phosphate
  modified_base 7: mod_base = OTHER; note = 2'-O-methylcytidine-3'-phosphate
  modified_base 8: mod_base = OTHER; note = 2'-O-methyladenosine-3'-phosphate
  modified_base 9: mod_base = OTHER; note = 2'-O-methylguanosine-3'-phosphate
  modified_base 10: mod_base = OTHER; note = 2'-O-methylguanosine-3'-phosphate
  modified_base 11: mod_base = OTHER; note = 2'-O-methylguanosine-3'-phosphate
  modified_base 12: mod_base = OTHER; note = 2'-O-methyladenosine-3'-phosphate
  modified_base 13: mod_base = OTHER; note = 2'-O-methyladenosine-3'-phosphate
  modified_base 14: mod_base = OTHER; note = 2'-deoxy-2'-fluorocytidine-3'-phosphate
  modified_base 15: mod_base = OTHER; note = 2'-O-methyladenosine-3'-phosphate
  modified_base 16: mod_base = OTHER; note = 2'-deoxy-2'-fluoroguanosine-3'-phosphate
  modified_base 17: mod_base = OTHER; note = 2'-O-methyluridine-3'-phosphate
  modified_base 18: mod_base = OTHER; note = 2'-O-methylguanosine-3'-phosphate
  modified_base 19: mod_base = OTHER; note = 2'-O-methylcytidine-3'-phosphate
  modified_base 20: mod_base = OTHER; note = 2'-O-methyluridine-3'-phosphate
  modified_base 21: mod_base = OTHER; note = 2'-O-methylguanosine-3'-phosphorothioate
  modified_base 22: mod_base = OTHER; note = 2'-O-methylguanosine-3'-phosphorothioate
  modified_base 23: mod_base = OTHER; note = 2'-O-methylguanosine
ttatggcagggaacagtgctggg

SEQ ID NO: 13100 - RNA, 23 nt, synthetic construct
  source 1..23: mol_type = other RNA
  modified_base 1: mod_base = OTHER; note = 2'-O-methyluridine-3'-phosphorothioate 5'-(E)-Vinylphosphonate
  modified_base 2: mod_base = OTHER; note = 2'-deoxy-2'-fluoroadenosine-3'-phosphorothioate
  modified_base 3: mod_base = OTHER; note = 2'-O-methyluridine-3'-phosphate
  modified_base 4: mod_base = OTHER; note = 2'-O-methyladenosine-3'-phosphate
  modified_base 5: mod_base = OTHER; note = 2'-O-methyluridine-3'-phosphate
  modified_base 6: mod_base = OTHER; note = 2'-deoxy-2'-fluoroguanosine-3'-phosphate
  modified_base 7: mod_base = OTHER; note = 2'-O-methylguanosine-3'-phosphate
  modified_base 8: mod_base = OTHER; note = 2'-O-methylcytidine-3'-phosphate
  modified_base 9: mod_base = OTHER; note = 2'-O-methyladenosine-3'-phosphate
  modified_base 10: mod_base = OTHER; note = 2'-O-methylguanosine-3'-phosphate
  modified_base 11: mod_base = OTHER; note = 2'-O-methylguanosine-3'-phosphate
  modified_base 12: mod_base = OTHER; note = 2'-O-methylguanosine-3'-phosphate
  modified_base 13: mod_base = OTHER; note = 2'-O-methyladenosine-3'-phosphate
  modified_base 14: mod_base = OTHER; note = 2'-deoxy-2'-fluoroadenosine-3'-phosphate
  modified_base 15: mod_base = OTHER; note = 2'-O-methylcytidine-3'-phosphate
  modified_base 16: mod_base = OTHER; note = 2'-deoxy-2'-fluoroadenosine-3'-phosphate
  modified_base 17: mod_base = OTHER; note = 2'-O-methylguanosine-3'-phosphate
  modified_base 18: mod_base = OTHER; note = 2'-O-methyluridine-3'-phosphate
  modified_base 19: mod_base = OTHER; note = 2'-O-methylguanosine-3'-phosphate
  modified_base 20: mod_base = OTHER; note = 2'-O-methylcytidine-3'-phosphate
  modified_base 21: mod_base = OTHER; note = 2'-O-methyluridine-3'-phosphorothioate
  modified_base 22: mod_base = OTHER; note = 2'-O-methylguanosine-3'-phosphorothioate
  modified_base 23: mod_base = OTHER; note = 2'-O-methylguanosine
tatatggcagggaacagtgctgg

SEQ ID NO: 13101 - RNA, 23 nt, synthetic construct
  source 1..23: mol_type = other RNA
  modified_base 1: mod_base = OTHER; note = 2'-O-methyluridine-3'-phosphorothioate 5'-(E)-Vinylphosphonate
  modified_base 2: mod_base = OTHER; note = 2'-deoxy-2'-fluoroguanosine-3'-phosphorothioate
  modified_base 3: mod_base = OTHER; note = 2'-O-methyladenosine-3'-phosphate
  modified_base 4: mod_base = OTHER; note = 2'-O-methyluridine-3'-phosphate
  modified_base 5: mod_base = OTHER; note = 2'-O-methyladenosine-3'-phosphate
  modified_base 6: mod_base = OTHER; note = 2'-deoxy-2'-fluorouridine-3'-phosphate
  modified_base 7: mod_base = OTHER; note = 2'-O-methylguanosine-3'-phosphate
  modified_base 8: mod_base = OTHER; note = 2'-O-methylguanosine-3'-phosphate
  modified_base 9: mod_base = OTHER; note = 2'-O-methylcytidine-3'-phosphate
  modified_base 10: mod_base = OTHER; note = 2'-O-methyladenosine-3'-phosphate
  modified_base 11: mod_base = OTHER; note = 2'-O-methylguanosine-3'-phosphate
  modified_base 12: mod_base = OTHER; note = 2'-O-methylguanosine-3'-phosphate
  modified_base 13: mod_base = OTHER; note = 2'-O-methylguanosine-3'-phosphate
  modified_base 14: mod_base = OTHER; note = 2'-deoxy-2'-fluoroadenosine-3'-phosphate
  modified_base 15: mod_base = OTHER; note = 2'-O-methyladenosine-3'-phosphate
  modified_base 16: mod_base = OTHER; note = 2'-deoxy-2'-fluorocytidine-3'-phosphate
  modified_base 17: mod_base = OTHER; note = 2'-O-methyladenosine-3'-phosphate
  modified_base 18: mod_base = OTHER; note = 2'-O-methylguanosine-3'-phosphate
  modified_base 19: mod_base = OTHER; note = 2'-O-methyluridine-3'-phosphate
  modified_base 20: mod_base = OTHER; note = 2'-O-methylguanosine-3'-phosphate
  modified_base 21: mod_base = OTHER; note = 2'-O-methylcytidine-3'-phosphorothioate
  modified_base 22: mod_base = OTHER; note = 2'-O-methyluridine-3'-phosphorothioate
  modified_base 23: mod_base = OTHER; note = 2'-O-methylguanosine
tgatatggcagggaacagtgctg

SEQ ID NO: 13102 - RNA, 23 nt, synthetic construct
  source 1..23: mol_type = other RNA
  modified_base 1: mod_base = OTHER; note = 2'-O-methyluridine-3'-phosphorothioate 5'-(E)-Vinylphosphonate
  modified_base 2: mod_base = OTHER; note = 2'-deoxy-2'-fluoroguanosine-3'-phosphorothioate
  modified_base 3: mod_base = OTHER; note = 2'-O-methylguanosine-3'-phosphate
  modified_base 4: mod_base = OTHER; note = 2'-O-methyladenosine-3'-phosphate
  modified_base 5: mod_base = OTHER; note = 2'-O-methyluridine-3'-phosphate
  modified_base 6: mod_base = OTHER; note = 2'-deoxy-2'-fluoroadenosine-3'-phosphate
  modified_base 7: mod_base = OTHER; note = 2'-O-methyluridine-3'-phosphate
  modified_base 8: mod_base = OTHER; note = 2'-O-methylguanosine-3'-phosphate
  modified_base 9: mod_base = OTHER; note = 2'-O-methylguanosine-3'-phosphate
  modified_base 10: mod_base = OTHER; note = 2'-O-methylcytidine-3'-phosphate
  modified_base 11: mod_base = OTHER; note = 2'-O-methyladenosine-3'-phosphate
  modified_base 12: mod_base = OTHER; note = 2'-O-methylguanosine-3'-phosphate
  modified_base 13: mod_base = OTHER; note = 2'-O-methylguanosine-3'-phosphate
  modified_base 14: mod_base = OTHER; note = 2'-deoxy-2'-fluoroguanosine-3'-phosphate
  modified_base 15: mod_base = OTHER; note = 2'-O-methyladenosine-3'-phosphate
  modified_base 16: mod_base = OTHER; note = 2'-deoxy-2'-fluoroadenosine-3'-phosphate
  modified_base 17: mod_base = OTHER; note = 2'-O-methylcytidine-3'-phosphate
  modified_base 18: mod_base = OTHER; note = 2'-O-methyladenosine-3'-phosphate
  modified_base 19: mod_base = OTHER; note = 2'-O-methylguanosine-3'-phosphate
  modified_base 20: mod_base = OTHER; note = 2'-O-methyluridine-3'-phosphate
  modified_base 21: mod_base = OTHER; note = 2'-O-methylguanosine-3'-phosphorothioate
  modified_base 22: mod_base = OTHER; note = 2'-O-methylcytidine-3'-phosphorothioate
  modified_base 23: mod_base = OTHER; note = 2'-O-methyluridine
tggatatggcagggaacagtgct

SEQ ID NO: 13103 - RNA, 23 nt, synthetic construct
  source 1..23: mol_type = other RNA
  modified_base 1: mod_base = OTHER; note = 2'-O-methyluridine-3'-phosphorothioate 5'-(E)-Vinylphosphonate
  modified_base 2: mod_base = OTHER; note = 2'-deoxy-2'-fluorouridine-3'-phosphorothioate
  modified_base 3: mod_base = OTHER; note = 2'-O-methyluridine-3'-phosphate
  modified_base 4: mod_base = OTHER; note = 2'-O-methyluridine-3'-phosphate
  modified_base 5: mod_base = OTHER; note = 2'-O-methyluridine-3'-phosphate
  modified_base 6: mod_base = OTHER; note = 2'-deoxy-2'-fluorouridine-3'-phosphate
  modified_base 7: mod_base = OTHER; note = 2'-O-methyladenosine-3'-phosphate
  modified_base 8: mod_base = OTHER; note = 2'-O-methyladenosine-3'-phosphate
  modified_base 9: mod_base = OTHER; note = 2'-O-methyluridine-3'-phosphate
  modified_base 10: mod_base = OTHER; note = 2'-O-methylcytidine-3'-phosphate
  modified_base 11: mod_base = OTHER; note = 2'-O-methyladenosine-3'-phosphate
  modified_base 12: mod_base = OTHER; note = 2'-O-methylguanosine-3'-phosphate
  modified_base 13: mod_base = OTHER; note = 2'-O-methyluridine-3'-phosphate
  modified_base 14: mod_base = OTHER; note = 2'-deoxy-2'-fluoroadenosine-3'-phosphate
  modified_base 15: mod_base = OTHER; note = 2'-O-methyladenosine-3'-phosphate
  modified_base 16: mod_base = OTHER; note = 2'-deoxy-2'-fluoroadenosine-3'-phosphate
  modified_base 17: mod_base = OTHER; note = 2'-O-methyladenosine-3'-phosphate
  modified_base 18: mod_base = OTHER; note = 2'-O-methylguanosine-3'-phosphate
  modified_base 19: mod_base = OTHER; note = 2'-O-methyluridine-3'-phosphate
  modified_base 20: mod_base = OTHER; note = 2'-O-methyluridine-3'-phosphate
  modified_base 21: mod_base = OTHER; note = 2'-O-methylguanosine-3'-phosphorothioate
  modified_base 22: mod_base = OTHER; note = 2'-O-methylguanosine-3'-phosphorothioate
  modified_base 23: mod_base = OTHER; note = 2'-O-methylguanosine
ttttttaatcagtaaaagttggg

SEQ ID NO: 13104 - RNA, 23 nt, synthetic construct
  source 1..23: mol_type = other RNA
  modified_base 1: mod_base = OTHER; note = 2'-O-methyluridine-3'-phosphorothioate 5'-(E)-Vinylphosphonate
  modified_base 2: mod_base = OTHER; note = 2'-deoxy-2'-fluoroadenosine-3'-phosphorothioate
  modified_base 3: mod_base = OTHER; note = 2'-O-methyluridine-3'-phosphate
  modified_base 4: mod_base = OTHER; note = 2'-O-methylcytidine-3'-phosphate
  modified_base 5: mod_base = OTHER; note = 2'-O-methyladenosine-3'-phosphate
  modified_base 6: mod_base = OTHER; note = 2'-deoxy-2'-fluorouridine-3'-phosphate
  modified_base 7: mod_base = OTHER; note = 2'-O-methyluridine-3'-phosphate
  modified_base 8: mod_base = OTHER; note = 2'-O-methylguanosine-3'-phosphate
  modified_base 9: mod_base = OTHER; note = 2'-O-methyladenosine-3'-phosphate
  modified_base 10: mod_base = OTHER; note = 2'-O-methyladenosine-3'-phosphate
  modified_base 11: mod_base = OTHER; note = 2'-O-methyluridine-3'-phosphate
  modified_base 12: mod_base = OTHER; note = 2'-O-methylguanosine-3'-phosphate
  modified_base 13: mod_base = OTHER; note = 2'-O-methylguanosine-3'-phosphate
  modified_base 14: mod_base = OTHER; note = 2'-deoxy-2'-fluorocytidine-3'-phosphate
  modified_base 15: mod_base = OTHER; note = 2'-O-methyladenosine-3'-phosphate
  modified_base 16: mod_base = OTHER; note = 2'-deoxy-2'-fluorocytidine-3'-phosphate
  modified_base 17: mod_base = OTHER; note = 2'-O-methyladenosine-3'-phosphate
  modified_base 18: mod_base = OTHER; note = 2'-O-methyluridine-3'-phosphate
  modified_base 19: mod_base = OTHER; note = 2'-O-methyluridine-3'-phosphate
  modified_base 20: mod_base = OTHER; note = 2'-O-methyladenosine-3'-phosphate
  modified_base 21: mod_base = OTHER; note = 2'-O-methylcytidine-3'-phosphorothioate
  modified_base 22: mod_base = OTHER; note = 2'-O-methylguanosine-3'-phosphorothioate
  modified_base 23: mod_base = OTHER; note = 2'-O-methyluridine
tatcattgaatggcacattacgt

SEQ ID NO: 13105 - RNA, 23 nt, synthetic construct
  source 1..23: mol_type = other RNA
  modified_base 1: mod_base = OTHER; note = 2'-O-methyluridine-3'-phosphorothioate 5'-(E)-Vinylphosphonate
  modified_base 2: mod_base = OTHER; note = 2'-deoxy-2'-fluoroadenosine-3'-phosphorothioate
  modified_base 3: mod_base = OTHER; note = 2'-O-methyladenosine-3'-phosphate
  modified_base 4: mod_base = OTHER; note = 2'-O-methyladenosine-3'-phosphate
  modified_base 5: mod_base = OTHER; note = 2'-O-methylguanosine-3'-phosphate
  modified_base 6: mod_base = OTHER; note = 2'-deoxy-2'-fluorouridine-3'-phosphate
  modified_base 7: mod_base = OTHER; note = 2'-O-methylguanosine-3'-phosphate
  modified_base 8: mod_base = OTHER; note = 2'-O-methylguanosine-3'-phosphate
  modified_base 9: mod_base = OTHER; note = 2'-O-methylguanosine-3'-phosphate
  modified_base 10: mod_base = OTHER; note = 2'-O-methyladenosine-3'-phosphate
  modified_base 11: mod_base = OTHER; note = 2'-O-methyluridine-3'-phosphate
  modified_base 12: mod_base = OTHER; note = 2'-O-methyluridine-3'-phosphate
  modified_base 13: mod_base = OTHER; note = 2'-O-methyluridine-3'-phosphate
  modified_base 14: mod_base = OTHER; note = 2'-deoxy-2'-fluorouridine-3'-phosphate
  modified_base 15: mod_base = OTHER; note = 2'-O-methyladenosine-3'-phosphate
  modified_base 16: mod_base = OTHER; note = 2'-deoxy-2'-fluorouridine-3'-phosphate
  modified_base 17: mod_base = OTHER; note = 2'-O-methylcytidine-3'-phosphate
  modified_base 18: mod_base = OTHER; note = 2'-O-methyladenosine-3'-phosphate
  modified_base 19: mod_base = OTHER; note = 2'-O-methyluridine-3'-phosphate
  modified_base 20: mod_base = OTHER; note = 2'-O-methylcytidine-3'-phosphate
  modified_base 21: mod_base = OTHER; note = 2'-O-methyladenosine-3'-phosphorothioate
  modified_base 22: mod_base = OTHER; note = 2'-O-methyluridine-3'-phosphorothioate
  modified_base 23: mod_base = OTHER; note = 2'-O-methylcytidine
taaagtgggattttatcatcatc

SEQ ID NO: 13106 - RNA, 23 nt, synthetic construct
  source 1..23: mol_type = other RNA
  modified_base 1: mod_base = OTHER; note = 2'-O-methyluridine-3'-phosphorothioate 5'-(E)-Vinylphosphonate
  modified_base 2: mod_base = OTHER; note = 2'-deoxy-2'-fluoroadenosine-3'-phosphorothioate
  modified_base 3: mod_base = OTHER; note = 2'-O-methyladenosine-3'-phosphate
  modified_base 4: mod_base = OTHER; note = 2'-O-methyladenosine-3'-phosphate
  modified_base 5: mod_base = OTHER; note = 2'-O-methyladenosine-3'-phosphate
  modified_base 6: mod_base = OTHER; note = 2'-deoxy-2'-fluoroguanosine-3'-phosphate
  modified_base 7: mod_base = OTHER; note = 2'-O-methyluridine-3'-phosphate
  modified_base 8: mod_base = OTHER; note = 2'-O-methylguanosine-3'-phosphate
  modified_base 9: mod_base = OTHER; note = 2'-O-methylguanosine-3'-phosphate
  modified_base 10: mod_base = OTHER; note = 2'-O-methylguanosine-3'-phosphate
  modified_base 11: mod_base = OTHER; note = 2'-O-methyladenosine-3'-phosphate
  modified_base 12: mod_base = OTHER; note = 2'-O-methyluridine-3'-phosphate
  modified_base 13: mod_base = OTHER; note = 2'-O-methyluridine-3'-phosphate
  modified_base 14: mod_base = OTHER; note = 2'-deoxy-2'-fluorouridine-3'-phosphate
  modified_base 15: mod_base = OTHER; note = 2'-O-methyluridine-3'-phosphate
  modified_base 16: mod_base = OTHER; note = 2'-deoxy-2'-fluoroadenosine-3'-phosphate
  modified_base 17: mod_base = OTHER; note = 2'-O-methyluridine-3'-phosphate
  modified_base 18: mod_base = OTHER; note = 2'-O-methylcytidine-3'-phosphate
  modified_base 19: mod_base = OTHER; note = 2'-O-methyladenosine-3'-phosphate
  modified_base 20: mod_base = OTHER; note = 2'-O-methyluridine-3'-phosphate
  modified_base 21: mod_base = OTHER; note = 2'-O-methylcytidine-3'-phosphorothioate
  modified_base 22: mod_base = OTHER; note = 2'-O-methyladenosine-3'-phosphorothioate
  modified_base 23: mod_base = OTHER; note = 2'-O-methyluridine
taaaagtgggattttatcatcat

SEQ ID NO: 13107 - RNA, 23 nt, synthetic construct
  source 1..23: mol_type = other RNA
  modified_base 1: mod_base = OTHER; note = 2'-O-methyluridine-3'-phosphorothioate 5'-(E)-Vinylphosphonate
  modified_base 2: mod_base = OTHER; note = 2'-deoxy-2'-fluoroadenosine-3'-phosphorothioate
  modified_base 3: mod_base = OTHER; note = 2'-O-methylguanosine-3'-phosphate
  modified_base 4: mod_base = OTHER; note = 2'-O-methyladenosine-3'-phosphate
  modified_base 5: mod_base = OTHER; note = 2'-O-methyladenosine-3'-phosphate
  modified_base 6: mod_base = OTHER; note = 2'-deoxy-2'-fluoroadenosine-3'-phosphate
  modified_base 7: mod_base = OTHER; note = 2'-O-methylcytidine-3'-phosphate
  modified_base 8: mod_base = OTHER; note = 2'-O-methylcytidine-3'-phosphate
  modified_base 9: mod_base = OTHER; note = 2'-O-methylcytidine-3'-phosphate
  modified_base 10: mod_base = OTHER; note = 2'-O-methyladenosine-3'-phosphate
  modified_base 11: mod_base = OTHER; note = 2'-O-methyladenosine-3'-phosphate
  modified_base 12: mod_base = OTHER; note = 2'-O-methyladenosine-3'-phosphate
  modified_base 13: mod_base = OTHER; note = 2'-O-methylguanosine-3'-phosphate
  modified_base 14: mod_base = OTHER; note = 2'-deoxy-2'-fluoroadenosine-3'-phosphate
  modified_base 15: mod_base = OTHER; note = 2'-O-methyladenosine-3'-phosphate
  modified_base 16: mod_base = OTHER; note = 2'-deoxy-2'-fluoroadenosine-3'-phosphate
  modified_base 17: mod_base = OTHER; note = 2'-O-methyladenosine-3'-phosphate
  modified_base 18: mod_base = OTHER; note = 2'-O-methylguanosine-3'-phosphate
  modified_base 19: mod_base = OTHER; note = 2'-O-methyluridine-3'-phosphate
  modified_base 20: mod_base = OTHER; note = 2'-O-methylguanosine-3'-phosphate
  modified_base 21: mod_base = OTHER; note = 2'-O-methylguanosine-3'-phosphorothioate
  modified_base 22: mod_base = OTHER; note = 2'-O-methylguanosine-3'-phosphorothioate
  modified_base 23: mod_base = OTHER; note = 2'-O-methyladenosine
tagaaacccaaagaaaagtggga

SEQ ID NO: 13108 - RNA, 23 nt, synthetic construct
  source 1..23: mol_type = other RNA
  modified_base 1: mod_base = OTHER; note = 2'-O-methyluridine-3'-phosphorothioate 5'-(E)-Vinylphosphonate
  modified_base 2: mod_base = OTHER; note = 2'-deoxy-2'-fluorouridine-3'-phosphorothioate
  modified_base 3: mod_base = OTHER; note = 2'-O-methyladenosine-3'-phosphate
  modified_base 4: mod_base = OTHER; note = 2'-O-methylguanosine-3'-phosphate
  modified_base 5: mod_base = OTHER; note = 2'-O-methyladenosine-3'-phosphate
  modified_base 6: mod_base = OTHER; note = 2'-deoxy-2'-fluoroadenosine-3'-phosphate
  modified_base 7: mod_base = OTHER; note = 2'-O-methyladenosine-3'-phosphate
  modified_base 8: mod_base = OTHER; note = 2'-O-methylcytidine-3'-phosphate
  modified_base 9: mod_base = OTHER; note = 2'-O-methylcytidine-3'-phosphate
  modified_base 10: mod_base = OTHER; note = 2'-O-methylcytidine-3'-phosphate
  modified_base 11: mod_base = OTHER; note = 2'-O-methyladenosine-3'-phosphate
  modified_base 12: mod_base = OTHER; note = 2'-O-methyladenosine-3'-phosphate
  modified_base 13: mod_base = OTHER; note = 2'-O-methyladenosine-3'-phosphate
  modified_base 14: mod_base = OTHER; note = 2'-deoxy-2'-fluoroguanosine-3'-phosphate
  modified_base 15: mod_base = OTHER; note = 2'-O-methyladenosine-3'-phosphate
  modified_base 16: mod_base = OTHER; note = 2'-deoxy-2'-fluoroadenosine-3'-phosphate
  modified_base 17: mod_base = OTHER; note = 2'-O-methyladenosine-3'-phosphate
  modified_base 18: mod_base = OTHER; note = 2'-O-methyladenosine-3'-phosphate
  modified_base 19: mod_base = OTHER; note = 2'-O-methylguanosine-3'-phosphate
  modified_base 20: mod_base = OTHER; note = 2'-O-methyluridine-3'-phosphate
  modified_base 21: mod_base = OTHER; note = 2'-O-methylguanosine-3'-phosphorothioate
  modified_base 22: mod_base = OTHER; note = 2'-O-methylguanosine-3'-phosphorothioate
  modified_base 23: mod_base = OTHER; note = 2'-O-methylguanosine
ttagaaacccaaagaaaagtggg

SEQ ID NO: 13109 - RNA, 23 nt, synthetic construct
  source 1..23: mol_type = other RNA
  modified_base 1: mod_base = OTHER; note = 2'-O-methyluridine-3'-phosphorothioate 5'-(E)-Vinylphosphonate
  modified_base 2: mod_base = OTHER; note = 2'-deoxy-2'-fluoroguanosine-3'-phosphorothioate
  modified_base 3: mod_base = OTHER; note = 2'-O-methyluridine-3'-phosphate
  modified_base 4: mod_base = OTHER; note = 2'-O-methyladenosine-3'-phosphate
  modified_base 5: mod_base = OTHER; note = 2'-O-methylguanosine-3'-phosphate
  modified_base 6: mod_base = OTHER; note = 2'-deoxy-2'-fluoroadenosine-3'-phosphate
  modified_base 7: mod_base = OTHER; note = 2'-O-methyladenosine-3'-phosphate
  modified_base 8: mod_base = OTHER; note = 2'-O-methyladenosine-3'-phosphate
  modified_base 9: mod_base = OTHER; note = 2'-O-methylcytidine-3'-phosphate
  modified_base 10: mod_base = OTHER; note = 2'-O-methylcytidine-3'-phosphate
  modified_base 11: mod_base = OTHER; note = 2'-O-methylcytidine-3'-phosphate
  modified_base 12: mod_base = OTHER; note = 2'-O-methyladenosine-3'-phosphate
  modified_base 13: mod_base = OTHER; note = 2'-O-methyladenosine-3'-phosphate
  modified_base 14: mod_base = OTHER; note = 2'-deoxy-2'-fluoroadenosine-3'-phosphate
  modified_base 15: mod_base = OTHER; note = 2'-O-methylguanosine-3'-phosphate
  modified_base 16: mod_base = OTHER; note = 2'-deoxy-2'-fluoroadenosine-3'-phosphate
  modified_base 17: mod_base = OTHER; note = 2'-O-methyladenosine-3'-phosphate
  modified_base 18: mod_base = OTHER; note = 2'-O-methyladenosine-3'-phosphate
  modified_base 19: mod_base = OTHER; note = 2'-O-methyladenosine-3'-phosphate
  modified_base 20: mod_base = OTHER; note = 2'-O-methylguanosine-3'-phosphate
  modified_base 21: mod_base = OTHER; note = 2'-O-methyluridine-3'-phosphorothioate
  modified_base 22: mod_base = OTHER; note = 2'-O-methylguanosine-3'-phosphorothioate
  modified_base 23: mod_base = OTHER; note = 2'-O-methylguanosine
tgtagaaacccaaagaaaagtgg

SEQ ID NO: 13110 - RNA, 23 nt, synthetic construct
  source 1..23: mol_type = other RNA
  modified_base 1: mod_base = OTHER; note = 2'-O-methyluridine-3'-phosphorothioate 5'-(E)-Vinylphosphonate
  modified_base 2: mod_base = OTHER; note = 2'-deoxy-2'-fluoroadenosine-3'-phosphorothioate
  modified_base 3: mod_base = OTHER; note = 2'-O-methylguanosine-3'-phosphate
  modified_base 4: mod_base = OTHER; note = 2'-O-methyluridine-3'-phosphate
  modified_base 5: mod_base = OTHER; note = 2'-O-methyladenosine-3'-phosphate
  modified_base 6: mod_base = OTHER; note = 2'-deoxy-2'-fluoroguanosine-3'-phosphate
  modified_base 7: mod_base = OTHER; note = 2'-O-methyladenosine-3'-phosphate
  modified_base 8: mod_base = OTHER; note = 2'-O-methyladenosine-3'-phosphate
  modified_base 9: mod_base = OTHER; note = 2'-O-methyladenosine-3'-phosphate
  modified_base 10: mod_base = OTHER; note = 2'-O-methylcytidine-3'-phosphate
  modified_base 11: mod_base = OTHER; note = 2'-O-methylcytidine-3'-phosphate
  modified_base 12: mod_base = OTHER; note = 2'-O-methylcytidine-3'-phosphate
  modified_base 13: mod_base = OTHER; note = 2'-O-methyladenosine-3'-phosphate
  modified_base 14: mod_base = OTHER; note = 2'-deoxy-2'-fluoroadenosine-3'-phosphate
  modified_base 15: mod_base = OTHER; note = 2'-O-methyladenosine-3'-phosphate
  modified_base 16: mod_base = OTHER; note = 2'-deoxy-2'-fluoroguanosine-3'-phosphate
  modified_base 17: mod_base = OTHER; note = 2'-O-methyladenosine-3'-phosphate
  modified_base 18: mod_base = OTHER; note = 2'-O-methyladenosine-3'-phosphate
  modified_base 19: mod_base = OTHER; note = 2'-O-methyladenosine-3'-phosphate
  modified_base 20: mod_base = OTHER; note = 2'-O-methyladenosine-3'-phosphate
  modified_base 21: mod_base = OTHER; note = 2'-O-methylguanosine-3'-phosphorothioate
  modified_base 22: mod_base = OTHER; note = 2'-O-methyluridine-3'-phosphorothioate
  modified_base 23: mod_base = OTHER; note = 2'-O-methylguanosine
tagtagaaacccaaagaaaagtg

SEQ ID NO: 13111 - RNA, 23 nt, synthetic construct
  source 1..23: mol_type = other RNA
  modified_base 1: mod_base = OTHER; note = 2'-O-methyluridine-3'-phosphorothioate 5'-(E)-Vinylphosphonate
  modified_base 2: mod_base = OTHER; note = 2'-deoxy-2'-fluorouridine-3'-phosphorothioate
  modified_base 3: mod_base = OTHER; note = 2'-O-methyladenosine-3'-phosphate
  modified_base 4: mod_base = OTHER; note = 2'-O-methylguanosine-3'-phosphate
  modified_base 5: mod_base = OTHER; note = 2'-O-methyluridine-3'-phosphate
  modified_base 6: mod_base = OTHER; note = 2'-deoxy-2'-fluoroadenosine-3'-phosphate
  modified_base 7: mod_base = OTHER; note = 2'-O-methylguanosine-3'-phosphate
  modified_base 8: mod_base = OTHER; note = 2'-O-methyladenosine-3'-phosphate
  modified_base 9: mod_base = OTHER; note = 2'-O-methyladenosine-3'-phosphate
  modified_base 10: mod_base = OTHER; note = 2'-O-methyladenosine-3'-phosphate
  modified_base 11: mod_base = OTHER; note = 2'-O-methylcytidine-3'-phosphate
  modified_base 12: mod_base = OTHER; note = 2'-O-methylcytidine-3'-phosphate
  modified_base 13: mod_base = OTHER; note = 2'-O-methylcytidine-3'-phosphate
  modified_base 14: mod_base = OTHER; note = 2'-deoxy-2'-fluoroadenosine-3'-phosphate
  modified_base 15: mod_base = OTHER; note = 2'-O-methyladenosine-3'-phosphate
  modified_base 16: mod_base = OTHER; note = 2'-deoxy-2'-fluoroadenosine-3'-phosphate
  modified_base 17: mod_base = OTHER; note = 2'-O-methylguanosine-3'-phosphate
  modified_base 18: mod_base = OTHER; note = 2'-O-methyladenosine-3'-phosphate
  modified_base 19: mod_base = OTHER; note = 2'-O-methyladenosine-3'-phosphate
  modified_base 20: mod_base = OTHER; note = 2'-O-methyladenosine-3'-phosphate
  modified_base 21: mod_base = OTHER; note = 2'-O-methyladenosine-3'-phosphorothioate
  modified_base 22: mod_base = OTHER; note = 2'-O-methylguanosine-3'-phosphorothioate
  modified_base 23: mod_base = OTHER; note = 2'-O-methyluridine
ttagtagaaacccaaagaaaagt

SEQ ID NO: 13112 - RNA, 23 nt, synthetic construct
  source 1..23: mol_type = other RNA
  modified_base 1: mod_base = OTHER; note = 2'-O-methyluridine-3'-phosphorothioate 5'-(E)-Vinylphosphonate
  modified_base 2: mod_base = OTHER; note = 2'-deoxy-2'-fluorouridine-3'-phosphorothioate
  modified_base 3: mod_base = OTHER; note = 2'-O-methyluridine-3'-phosphate
  modified_base 4: mod_base = OTHER; note = 2'-O-methyladenosine-3'-phosphate
  modified_base 5: mod_base = OTHER; note = 2'-O-methylguanosine-3'-phosphate
  modified_base 6: mod_base = OTHER; note = 2'-deoxy-2'-fluorouridine-3'-phosphate
  modified_base 7: mod_base = OTHER; note = 2'-O-methyladenosine-3'-phosphate
  modified_base 8: mod_base = OTHER; note = 2'-O-methylguanosine-3'-phosphate
  modified_base 9: mod_base = OTHER; note = 2'-O-methyladenosine-3'-phosphate
  modified_base 10: mod_base = OTHER; note = 2'-O-methyladenosine-3'-phosphate
  modified_base 11: mod_base = OTHER; note = 2'-O-methyladenosine-3'-phosphate
  modified_base 12: mod_base = OTHER; note = 2'-O-methylcytidine-3'-phosphate
  modified_base 13: mod_base = OTHER; note = 2'-O-methylcytidine-3'-phosphate
  modified_base 14: mod_base = OTHER; note = 2'-deoxy-2'-fluorocytidine-3'-phosphate
  modified_base 15: mod_base = OTHER; note = 2'-O-methyladenosine-3'-phosphate
  modified_base 16: mod_base = OTHER; note = 2'-deoxy-2'-fluoroadenosine-3'-phosphate
  modified_base 17: mod_base = OTHER; note = 2'-O-methyladenosine-3'-phosphate
  modified_base 18: mod_base = OTHER; note = 2'-O-methylguanosine-3'-phosphate
  modified_base 19: mod_base = OTHER; note = 2'-O-methyladenosine-3'-phosphate
  modified_base 20: mod_base = OTHER; note = 2'-O-methyladenosine-3'-phosphate
  modified_base 21: mod_base = OTHER; note = 2'-O-methyladenosine-3'-phosphorothioate
  modified_base 22: mod_base = OTHER; note = 2'-O-methyladenosine-3'-phosphorothioate
  modified_base 23: mod_base = OTHER; note = 2'-O-methylguanosine
tttagtagaaacccaaagaaaag

SEQ ID NO: 13113 - RNA, 23 nt, synthetic construct
  source 1..23: mol_type = other RNA
  modified_base 1: mod_base = OTHER; note = 2'-O-methyluridine-3'-phosphorothioate 5'-(E)-Vinylphosphonate
  modified_base 2: mod_base = OTHER; note = 2'-deoxy-2'-fluorouridine-3'-phosphorothioate
  modified_base 3: mod_base = OTHER; note = 2'-O-methyluridine-3'-phosphate
  modified_base 4: mod_base = OTHER; note = 2'-O-methyluridine-3'-phosphate
  modified_base 5: mod_base = OTHER; note = 2'-O-methyladenosine-3'-phosphate
  modified_base 6: mod_base = OTHER; note = 2'-deoxy-2'-fluoroguanosine-3'-phosphate
  modified_base 7: mod_base = OTHER; note = 2'-O-methyluridine-3'-phosphate
  modified_base 8: mod_base = OTHER; note = 2'-O-methyladenosine-3'-phosphate
  modified_base 9: mod_base = OTHER; note = 2'-O-methylguanosine-3'-phosphate
  modified_base 10: mod_base = OTHER; note = 2'-O-methyladenosine-3'-phosphate
  modified_base 11: mod_base = OTHER; note = 2'-O-methyladenosine-3'-phosphate
  modified_base 12: mod_base = OTHER; note = 2'-O-methyladenosine-3'-phosphate
  modified_base 13: mod_base = OTHER; note = 2'-O-methylcytidine-3'-phosphate
  modified_base 14: mod_base = OTHER; note = 2'-deoxy-2'-fluorocytidine-3'-phosphate
  modified_base 15: mod_base = OTHER; note = 2'-O-methylcytidine-3'-phosphate
  modified_base 16: mod_base = OTHER; note = 2'-deoxy-2'-fluoroadenosine-3'-phosphate
  modified_base 17: mod_base = OTHER; note = 2'-O-methyladenosine-3'-phosphate
  modified_base 18: mod_base = OTHER; note = 2'-O-methyladenosine-3'-phosphate
  modified_base 19: mod_base = OTHER; note = 2'-O-methylguanosine-3'-phosphate
  modified_base 20: mod_base = OTHER; note = 2'-O-methyladenosine-3'-phosphate
  modified_base 21: mod_base = OTHER; note = 2'-O-methyladenosine-3'-phosphorothioate
  modified_base 22: mod_base = OTHER; note = 2'-O-methyladenosine-3'-phosphorothioate
  modified_base 23: mod_base = OTHER; note = 2'-O-methyladenosine
ttttagtagaaacccaaagaaaa

SEQ ID NO: 13114 - RNA, 23 nt, synthetic construct
  source 1..23: mol_type = other RNA
  modified_base 1: mod_base = OTHER; note = 2'-O-methyluridine-3'-phosphorothioate 5'-(E)-Vinylphosphonate
  modified_base 2: mod_base = OTHER; note = 2'-deoxy-2'-fluorouridine-3'-phosphorothioate
  modified_base 3: mod_base = OTHER; note = 2'-O-methyluridine-3'-phosphate
  modified_base 4: mod_base = OTHER; note = 2'-O-methyluridine-3'-phosphate
  modified_base 5: mod_base = OTHER; note = 2'-O-methyluridine-3'-phosphate
  modified_base 6: mod_base = OTHER; note = 2'-deoxy-2'-fluoroadenosine-3'-phosphate
  modified_base 7: mod_base = OTHER; note = 2'-O-methylguanosine-3'-phosphate
  modified_base 8: mod_base = OTHER; note = 2'-O-methyluridine-3'-phosphate
  modified_base 9: mod_base = OTHER; note = 2'-O-methyladenosine-3'-phosphate
  modified_base 10: mod_base = OTHER; note = 2'-O-methylguanosine-3'-phosphate
  modified_base 11: mod_base = OTHER; note = 2'-O-methyladenosine-3'-phosphate
  modified_base 12: mod_base = OTHER; note = 2'-O-methyladenosine-3'-phosphate
  modified_base 13: mod_base = OTHER; note = 2'-O-methyladenosine-3'-phosphate
  modified_base 14: mod_base = OTHER; note = 2'-deoxy-2'-fluorocytidine-3'-phosphate
  modified_base 15: mod_base = OTHER; note = 2'-O-methylcytidine-3'-phosphate
  modified_base 16: mod_base = OTHER; note = 2'-deoxy-2'-fluorocytidine-3'-phosphate
  modified_base 17: mod_base = OTHER; note = 2'-O-methyladenosine-3'-phosphate
  modified_base 18: mod_base = OTHER; note = 2'-O-methyladenosine-3'-phosphate
  modified_base 19: mod_base = OTHER; note = 2'-O-methyladenosine-3'-phosphate
  modified_base 20: mod_base = OTHER; note = 2'-O-methylguanosine-3'-phosphate
  modified_base 21: mod_base = OTHER; note = 2'-O-methyladenosine-3'-phosphorothioate
  modified_base 22: mod_base = OTHER; note = 2'-O-methyladenosine-3'-phosphorothioate
  modified_base 23: mod_base = OTHER; note = 2'-O-methyladenosine
tttttagtagaaacccaaagaaa

SEQ ID NO: 13115 - RNA, 23 nt, synthetic construct
  source 1..23: mol_type = other RNA
  modified_base 1: mod_base = OTHER; note = 2'-O-methyluridine-3'-phosphorothioate 5'-(E)-Vinylphosphonate
  modified_base 2: mod_base = OTHER; note = 2'-deoxy-2'-fluoroadenosine-3'-phosphorothioate
  modified_base 3: mod_base = OTHER; note = 2'-O-methyluridine-3'-phosphate
  modified_base 4: mod_base = OTHER; note = 2'-O-methyluridine-3'-phosphate
  modified_base 5: mod_base = OTHER; note = 2'-O-methyluridine-3'-phosphate
  modified_base 6: mod_base = OTHER; note = 2'-deoxy-2'-fluorouridine-3'-phosphate
  modified_base 7: mod_base = OTHER; note = 2'-O-methyladenosine-3'-phosphate
  modified_base 8: mod_base = OTHER; note = 2'-O-methylguanosine-3'-phosphate
  modified_base 9: mod_base = OTHER; note = 2'-O-methyluridine-3'-phosphate
  modified_base 10: mod_base = OTHER; note = 2'-O-methyladenosine-3'-phosphate
  modified_base 11: mod_base = OTHER; note = 2'-O-methylguanosine-3'-phosphate
  modified_base 12: mod_base = OTHER; note = 2'-O-methyladenosine-3'-phosphate
  modified_base 13: mod_base = OTHER; note = 2'-O-methyladenosine-3'-phosphate
  modified_base 14: mod_base = OTHER; note = 2'-deoxy-2'-fluoroadenosine-3'-phosphate
  modified_base 15: mod_base = OTHER; note = 2'-O-methylcytidine-3'-phosphate
  modified_base 16: mod_base = OTHER; note = 2'-deoxy-2'-fluorocytidine-3'-phosphate
  modified_base 17: mod_base = OTHER; note = 2'-O-methylcytidine-3'-phosphate
  modified_base 18: mod_base = OTHER; note = 2'-O-methyladenosine-3'-phosphate
  modified_base 19: mod_base = OTHER; note = 2'-O-methyladenosine-3'-phosphate
  modified_base 20: mod_base = OTHER; note = 2'-O-methyladenosine-3'-phosphate
  modified_base 21: mod_base = OTHER; note = 2'-O-methylguanosine-3'-phosphorothioate
  modified_base 22: mod_base = OTHER; note = 2'-O-methyladenosine-3'-phosphorothioate
  modified_base 23: mod_base = OTHER; note = 2'-O-methyladenosine
tattttagtagaaacccaaagaa

SEQ ID NO: 13116 - RNA, 23 nt, synthetic construct
  source 1..23: mol_type = other RNA
  modified_base 1: mod_base = OTHER; note = 2'-O-methyluridine-3'-phosphorothioate 5'-(E)-Vinylphosphonate
  modified_base 2: mod_base = OTHER; note = 2'-deoxy-2'-fluorouridine-3'-phosphorothioate
  modified_base 3: mod_base = OTHER; note = 2'-O-methyladenosine-3'-phosphate
  modified_base 4: mod_base = OTHER; note = 2'-O-methyluridine-3'-phosphate
  modified_base 5: mod_base = OTHER; note = 2'-O-methyluridine-3'-phosphate
  modified_base 6: mod_base = OTHER; note = 2'-deoxy-2'-fluorouridine-3'-phosphate
  modified_base 7: mod_base = OTHER; note = 2'-O-methyluridine-3'-phosphate
  modified_base 8: mod_base = OTHER; note = 2'-O-methyladenosine-3'-phosphate
  modified_base 9: mod_base = OTHER; note = 2'-O-methylguanosine-3'-phosphate
  modified_base 10: mod_base = OTHER; note = 2'-O-methyluridine-3'-phosphate
  modified_base 11: mod_base = OTHER; note = 2'-O-methyladenosine-3'-phosphate
  modified_base 12: mod_base = OTHER; note = 2'-O-methylguanosine-3'-phosphate
  modified_base 13: mod_base = OTHER; note = 2'-O-methyladenosine-3'-phosphate
  modified_base 14: mod_base = OTHER; note = 2'-deoxy-2'-fluoroadenosine-3'-phosphate
  modified_base 15: mod_base = OTHER; note = 2'-O-methyladenosine-3'-phosphate
  modified_base 16: mod_base = OTHER; note = 2'-deoxy-2'-fluorocytidine-3'-phosphate
  modified_base 17: mod_base = OTHER; note = 2'-O-methylcytidine-3'-phosphate
  modified_base 18: mod_base = OTHER; note = 2'-O-methylcytidine-3'-phosphate
  modified_base 19: mod_base = OTHER; note = 2'-O-methyladenosine-3'-phosphate
  modified_base 20: mod_base = OTHER; note = 2'-O-methyladenosine-3'-phosphate
  modified_base 21: mod_base = OTHER; note = 2'-O-methyladenosine-3'-phosphorothioate
  modified_base 22: mod_base = OTHER; note = 2'-O-methylguanosine-3'-phosphorothioate
  modified_base 23: mod_base = OTHER; note = 2'-O-methyladenosine
ttattttagtagaaacccaaaga

SEQ ID NO: 13117 - RNA, 23 nt, synthetic construct
  source 1..23: mol_type = other RNA
  modified_base 1: mod_base = OTHER; note = 2'-O-methyluridine-3'-phosphorothioate 5'-(E)-Vinylphosphonate
  modified_base 2: mod_base = OTHER; note = 2'-deoxy-2'-fluorouridine-3'-phosphorothioate
  modified_base 3: mod_base = OTHER; note = 2'-O-methyluridine-3'-phosphate
  modified_base 4: mod_base = OTHER; note = 2'-O-methyladenosine-3'-phosphate
  modified_base 5: mod_base = OTHER; note = 2'-O-methyluridine-3'-phosphate
  modified_base 6: mod_base = OTHER; note = 2'-deoxy-2'-fluorouridine-3'-phosphate
  modified_base 7: mod_base = OTHER; note = 2'-O-methyluridine-3'-phosphate
  modified_base 8: mod_base = OTHER; note = 2'-O-methyluridine-3'-phosphate
  modified_base 9: mod_base = OTHER; note = 2'-O-methyladenosine-3'-phosphate
  modified_base 10: mod_base = OTHER; note = 2'-O-methylguanosine-3'-phosphate
  modified_base 11: mod_base = OTHER; note = 2'-O-methyluridine-3'-phosphate
  modified_base 12: mod_base = OTHER; note = 2'-O-methyladenosine-3'-phosphate
  modified_base 13: mod_base = OTHER; note = 2'-O-methylguanosine-3'-phosphate
  modified_base 14: mod_base = OTHER; note = 2'-deoxy-2'-fluoroadenosine-3'-phosphate
  modified_base 15: mod_base = OTHER; note = 2'-O-methyladenosine-3'-phosphate
  modified_base 16: mod_base = OTHER; note = 2'-deoxy-2'-fluoroadenosine-3'-phosphate
  modified_base 17: mod_base = OTHER; note = 2'-O-methylcytidine-3'-phosphate
  modified_base 18: mod_base = OTHER; note = 2'-O-methylcytidine-3'-phosphate
  modified_base 19: mod_base = OTHER; note = 2'-O-methylcytidine-3'-phosphate
  modified_base 20: mod_base = OTHER; note = 2'-O-methyladenosine-3'-phosphate
  modified_base 21: mod_base = OTHER; note = 2'-O-methyladenosine-3'-phosphorothioate
  modified_base 22: mod_base = OTHER; note = 2'-O-methyladenosine-3'-phosphorothioate
  modified_base 23: mod_base = OTHER; note = 2'-O-methylguanosine
tttattttagtagaaacccaaag

SEQ ID NO: 13118 - RNA, 23 nt, synthetic construct
  source 1..23: mol_type = other RNA
  modified_base 1: mod_base = OTHER; note = 2'-O-methyluridine-3'-phosphorothioate 5'-(E)-Vinylphosphonate
  modified_base 2: mod_base = OTHER; note = 2'-deoxy-2'-fluorocytidine-3'-phosphorothioate
  modified_base 3: mod_base = OTHER; note = 2'-O-methyluridine-3'-phosphate
  modified_base 4: mod_base = OTHER; note = 2'-O-methylguanosine-3'-phosphate
  modified_base 5: mod_base = OTHER; note = 2'-O-methyladenosine-3'-phosphate
  modified_base 6: mod_base = OTHER; note = 2'-deoxy-2'-fluoroguanosine-3'-phosphate
  modified_base 7: mod_base = OTHER; note = 2'-O-methyluridine-3'-phosphate
  modified_base 8: mod_base = OTHER; note = 2'-O-methylguanosine-3'-phosphate
  modified_base 9: mod_base = OTHER; note = 2'-O-methyladenosine-3'-phosphate
  modified_base 10: mod_base = OTHER; note = 2'-O-methylguanosine-3'-phosphate
  modified_base 11: mod_base = OTHER; note = 2'-O-methyluridine-3'-phosphate
  modified_base 12: mod_base = OTHER; note = 2'-O-methyladenosine-3'-phosphate
  modified_base 13: mod_base = OTHER; note = 2'-O-methyladenosine-3'-phosphate
  modified_base 14: mod_base = OTHER; note = 2'-deoxy-2'-fluoroadenosine-3'-phosphate
  modified_base 15: mod_base = OTHER; note = 2'-O-methyluridine-3'-phosphate
  modified_base 16: mod_base = OTHER; note = 2'-deoxy-2'-fluorouridine-3'-phosphate
  modified_base 17: mod_base = OTHER; note = 2'-O-methyladenosine-3'-phosphate
  modified_base 18: mod_base = OTHER; note = 2'-O-methyluridine-3'-phosphate
  modified_base 19: mod_base = OTHER; note = 2'-O-methyluridine-3'-phosphate
  modified_base 20: mod_base = OTHER; note = 2'-O-methyluridine-3'-phosphate
  modified_base 21: mod_base = OTHER; note = 2'-O-methyluridine-3'-phosphorothioate
  modified_base 22: mod_base = OTHER; note = 2'-O-methyladenosine-3'-phosphorothioate
  modified_base 23: mod_base = OTHER; note = 2'-O-methylguanosine
tctgagtgagtaaattattttag

SEQ ID NO: 13119 - RNA, 23 nt, synthetic construct
  source 1..23: mol_type = other RNA
  modified_base 1: mod_base = OTHER; note = 2'-O-methyluridine-3'-phosphorothioate 5'-(E)-Vinylphosphonate
  modified_base 2: mod_base = OTHER; note = 2'-deoxy-2'-fluorocytidine-3'-phosphorothioate
  modified_base 3: mod_base = OTHER; note = 2'-O-methyluridine-3'-phosphate
  modified_base 4: mod_base = OTHER; note = 2'-O-methylcytidine-3'-phosphate
  modified_base 5: mod_base = OTHER; note = 2'-O-methyluridine-3'-phosphate
  modified_base 6: mod_base = OTHER; note = 2'-deoxy-2'-fluoroguanosine-3'-phosphate
  modified_base 7: mod_base = OTHER; note = 2'-O-methyladenosine-3'-phosphate
  modified_base 8: mod_base = OTHER; note = 2'-O-methylguanosine-3'-phosphate
  modified_base 9: mod_base = OTHER; note = 2'-O-methyluridine-3'-phosphate
  modified_base 10: mod_base = OTHER; note = 2'-O-methylguanosine-3'-phosphate
  modified_base 11: mod_base = OTHER; note = 2'-O-methyladenosine-3'-phosphate
  modified_base 12: mod_base = OTHER; note = 2'-O-methylguanosine-3'-phosphate
  modified_base 13: mod_base = OTHER; note = 2'-O-methyluridine-3'-phosphate
  modified_base 14: mod_base = OTHER; note = 2'-deoxy-2'-fluoroadenosine-3'-phosphate
  modified_base 15: mod_base = OTHER; note = 2'-O-methyladenosine-3'-phosphate
  modified_base 16: mod_base = OTHER; note = 2'-deoxy-2'-fluoroadenosine-3'-phosphate
  modified_base 17: mod_base = OTHER; note = 2'-O-methyluridine-3'-phosphate
  modified_base 18: mod_base = OTHER; note = 2'-O-methyluridine-3'-phosphate
  modified_base 19: mod_base = OTHER; note = 2'-O-methyladenosine-3'-phosphate
  modified_base 20: mod_base = OTHER; note = 2'-O-methyluridine-3'-phosphate
  modified_base 21: mod_base = OTHER; note = 2'-O-methyluridine-3'-phosphorothioate
  modified_base 22: mod_base = OTHER; note = 2'-O-methyluridine-3'-phosphorothioate
  modified_base 23: mod_base = OTHER; note = 2'-O-methyluridine
tctctgagtgagtaaattatttt

SEQ ID NO: 13120 - RNA, 23 nt, synthetic construct
  source 1..23: mol_type = other RNA
  modified_base 1: mod_base = OTHER; note = 2'-O-methyluridine-3'-phosphorothioate 5'-(E)-Vinylphosphonate
  modified_base 2: mod_base = OTHER; note = 2'-deoxy-2'-fluoroadenosine-3'-phosphorothioate
  modified_base 3: mod_base = OTHER; note = 2'-O-methylcytidine-3'-phosphate
  modified_base 4: mod_base = OTHER; note = 2'-O-methyluridine-3'-phosphate
  modified_base 5: mod_base = OTHER; note = 2'-O-methylcytidine-3'-phosphate
  modified_base 6: mod_base = OTHER; note = 2'-deoxy-2'-fluorouridine-3'-phosphate
  modified_base 7: mod_base = OTHER; note = 2'-O-methylguanosine-3'-phosphate
  modified_base 8: mod_base = OTHER; note = 2'-O-methyladenosine-3'-phosphate
  modified_base 9: mod_base = OTHER; note = 2'-O-methylguanosine-3'-phosphate
  modified_base 10: mod_base = OTHER; note = 2'-O-methyluridine-3'-phosphate
  modified_base 11: mod_base = OTHER; note = 2'-O-methylguanosine-3'-phosphate
  modified_base 12: mod_base = OTHER; note = 2'-O-methyladenosine-3'-phosphate
  modified_base 13: mod_base = OTHER; note = 2'-O-methylguanosine-3'-phosphate
  modified_base 14: mod_base = OTHER; note = 2'-deoxy-2'-fluorouridine-3'-phosphate
  modified_base 15: mod_base = OTHER; note = 2'-O-methyladenosine-3'-phosphate
  modified_base 16: mod_base = OTHER; note = 2'-deoxy-2'-fluoroadenosine-3'-phosphate
  modified_base 17: mod_base = OTHER; note = 2'-O-methyladenosine-3'-phosphate
  modified_base 18: mod_base = OTHER; note = 2'-O-methyluridine-3'-phosphate
  modified_base 19: mod_base = OTHER; note = 2'-O-methyluridine-3'-phosphate
  modified_base 20: mod_base = OTHER; note = 2'-O-methyladenosine-3'-phosphate
  modified_base 21: mod_base = OTHER; note = 2'-O-methyluridine-3'-phosphorothioate
  modified_base 22: mod_base = OTHER; note = 2'-O-methyluridine-3'-phosphorothioate
  modified_base 23: mod_base = OTHER; note = 2'-O-methyluridine
tactctgagtgagtaaattattt

SEQ ID NO: 13121 - RNA, 23 nt, synthetic construct
  source 1..23: mol_type = other RNA
  modified_base 1: mod_base = OTHER; note = 2'-O-methyluridine-3'-phosphorothioate 5'-(E)-Vinylphosphonate
  modified_base 2: mod_base = OTHER; note = 2'-deoxy-2'-fluorocytidine-3'-phosphorothioate
  modified_base 3: mod_base = OTHER; note = 2'-O-methyladenosine-3'-phosphate
  modified_base 4: mod_base = OTHER; note = 2'-O-methylcytidine-3'-phosphate
  modified_base 5: mod_base = OTHER; note = 2'-O-methyluridine-3'-phosphate
  modified_base 6: mod_base = OTHER; note = 2'-deoxy-2'-fluorocytidine-3'-phosphate
  modified_base 7: mod_base = OTHER; note = 2'-O-methyluridine-3'-phosphate
  modified_base 8: mod_base = OTHER; note = 2'-O-methylguanosine-3'-phosphate
  modified_base 9: mod_base = OTHER; note = 2'-O-methyladenosine-3'-phosphate
  modified_base 10: mod_base = OTHER; note = 2'-O-methylguanosine-3'-phosphate
  modified_base 11: mod_base = OTHER; note = 2'-O-methyluridine-3'-phosphate
  modified_base 12: mod_base = OTHER; note = 2'-O-methylguanosine-3'-phosphate
  modified_base 13: mod_base = OTHER; note = 2'-O-methyladenosine-3'-phosphate
  modified_base 14: mod_base = OTHER; note = 2'-deoxy-2'-fluoroguanosine-3'-phosphate
  modified_base 15: mod_base = OTHER; note = 2'-O-methyluridine-3'-phosphate
  modified_base 16: mod_base = OTHER; note = 2'-deoxy-2'-fluoroadenosine-3'-phosphate
  modified_base 17: mod_base = OTHER; note = 2'-O-methyladenosine-3'-phosphate
  modified_base 18: mod_base = OTHER; note = 2'-O-methyladenosine-3'-phosphate
  modified_base 19: mod_base = OTHER; note = 2'-O-methyluridine-3'-phosphate
  modified_base 20: mod_base = OTHER; note = 2'-O-methyluridine-3'-phosphate
  modified_base 21: mod_base = OTHER; note = 2'-O-methyladenosine-3'-phosphorothioate
  modified_base 22: mod_base = OTHER; note = 2'-O-methyluridine-3'-phosphorothioate
  modified_base 23: mod_base = OTHER; note = 2'-O-methyluridine
tcactctgagtgagtaaattatt

SEQ ID NO: 13122 - RNA, 23 nt, synthetic construct
  source 1..23: mol_type = other RNA
  modified_base 1: mod_base = OTHER; note = 2'-O-methyluridine-3'-phosphorothioate 5'-(E)-Vinylphosphonate
  modified_base 2: mod_base = OTHER; note = 2'-deoxy-2'-fluorouridine-3'-phosphorothioate
  modified_base 3: mod_base = OTHER; note = 2'-O-methylcytidine-3'-phosphate
  modified_base 4: mod_base = OTHER; note = 2'-O-methyladenosine-3'-phosphate
  modified_base 5: mod_base = OTHER; note = 2'-O-methylcytidine-3'-phosphate
  modified_base 6: mod_base = OTHER; note = 2'-deoxy-2'-fluorouridine-3'-phosphate
  modified_base 7: mod_base = OTHER; note = 2'-O-methylcytidine-3'-phosphate
  modified_base 8: mod_base = OTHER; note = 2'-O-methyluridine-3'-phosphate
  modified_base 9: mod_base = OTHER; note = 2'-O-methylguanosine-3'-phosphate
  modified_base 10: mod_base = OTHER; note = 2'-O-methyladenosine-3'-phosphate
  modified_base 11: mod_base = OTHER; note = 2'-O-methylguanosine-3'-phosphate
  modified_base 12: mod_base = OTHER; note = 2'-O-methyluridine-3'-phosphate
  modified_base 13: mod_base = OTHER; note = 2'-O-methylguanosine-3'-phosphate
  modified_base 14: mod_base = OTHER; note = 2'-deoxy-2'-fluoroadenosine-3'-phosphate
  modified_base 15: mod_base = OTHER; note = 2'-O-methylguanosine-3'-phosphate
  modified_base 16: mod_base = OTHER; note = 2'-deoxy-2'-fluorouridine-3'-phosphate
  modified_base 17: mod_base = OTHER; note = 2'-O-methyladenosine-3'-phosphate
  modified_base 18: mod_base = OTHER; note = 2'-O-methyladenosine-3'-phosphate
  modified_base 19: mod_base = OTHER; note = 2'-O-methyladenosine-3'-phosphate
  modified_base 20: mod_base = OTHER; note = 2'-O-methyluridine-3'-phosphate
  modified_base 21: mod_base = OTHER; note = 2'-O-methyluridine-3'-phosphorothioate
  modified_base 22: mod_base = OTHER; note = 2'-O-methyladenosine-3'-phosphorothioate
  modified_base 23: mod_base = OTHER; note = 2'-O-methyluridine
ttcactctgagtgagtaaattat

SEQ ID NO: 13123 - RNA, 23 nt, synthetic construct
  source 1..23: mol_type = other RNA
  modified_base 1: mod_base = OTHER; note = 2'-O-methyluridine-3'-phosphorothioate 5'-(E)-Vinylphosphonate
  modified_base 2: mod_base = OTHER; note = 2'-deoxy-2'-fluorocytidine-3'-phosphorothioate
  modified_base 3: mod_base = OTHER; note = 2'-O-methyluridine-3'-phosphate
  modified_base 4: mod_base = OTHER; note = 2'-O-methylcytidine-3'-phosphate
  modified_base 5: mod_base = OTHER; note = 2'-O-methyladenosine-3'-phosphate
  modified_base 6: mod_base = OTHER; note = 2'-deoxy-2'-fluorocytidine-3'-phosphate
  modified_base 7: mod_base = OTHER; note = 2'-O-methyluridine-3'-phosphate
  modified_base 8: mod_base = OTHER; note = 2'-O-methylcytidine-3'-phosphate
  modified_base 9: mod_base = OTHER; note = 2'-O-methyluridine-3'-phosphate
  modified_base 10: mod_base = OTHER; note = 2'-O-methylguanosine-3'-phosphate
  modified_base 11: mod_base = OTHER; note = 2'-O-methyladenosine-3'-phosphate
  modified_base 12: mod_base = OTHER; note = 2'-O-methylguanosine-3'-phosphate
  modified_base 13: mod_base = OTHER; note = 2'-O-methyluridine-3'-phosphate
  modified_base 14: mod_base = OTHER; note = 2'-deoxy-2'-fluoroguanosine-3'-phosphate
  modified_base 15: mod_base = OTHER; note = 2'-O-methyladenosine-3'-phosphate
  modified_base 16: mod_base = OTHER; note = 2'-deoxy-2'-fluoroguanosine-3'-phosphate
  modified_base 17: mod_base = OTHER; note = 2'-O-methyluridine-3'-phosphate
  modified_base 18: mod_base = OTHER; note = 2'-O-methyladenosine-3'-phosphate
  modified_base 19: mod_base = OTHER; note = 2'-O-methyladenosine-3'-phosphate
  modified_base 20: mod_base = OTHER; note = 2'-O-methyladenosine-3'-phosphate
  modified_base 21: mod_base = OTHER; note = 2'-O-methyluridine-3'-phosphorothioate
  modified_base 22: mod_base = OTHER; note = 2'-O-methyluridine-3'-phosphorothioate
  modified_base 23: mod_base = OTHER; note = 2'-O-methyladenosine
tctcactctgagtgagtaaatta

SEQ ID NO: 13124 - RNA, 23 nt, synthetic construct
  source 1..23: mol_type = other RNA
  modified_base 1: mod_base = OTHER; note = 2'-O-methyluridine-3'-phosphorothioate 5'-(E)-Vinylphosphonate
  modified_base 2: mod_base = OTHER; note = 2'-deoxy-2'-fluorouridine-3'-phosphorothioate
  modified_base 3: mod_base = OTHER; note = 2'-O-methyluridine-3'-phosphate
  modified_base 4: mod_base = OTHER; note = 2'-O-methyluridine-3'-phosphate
  modified_base 5: mod_base = OTHER; note = 2'-O-methyluridine-3'-phosphate
  modified_base 6: mod_base = OTHER; note = 2'-deoxy-2'-fluorouridine-3'-phosphate
  modified_base 7: mod_base = OTHER; note = 2'-O-methylcytidine-3'-phosphate
  modified_base 8: mod_base = OTHER; note = 2'-O-methyluridine-3'-phosphate
  modified_base 9: mod_base = OTHER; note = 2'-O-methylcytidine-3'-phosphate
  modified_base 10: mod_base = OTHER; note = 2'-O-methyladenosine-3'-phosphate
  modified_base 11: mod_base = OTHER; note = 2'-O-methyluridine-3'-phosphate
  modified_base 12: mod_base = OTHER; note = 2'-O-methyluridine-3'-phosphate
  modified_base 13: mod_base = OTHER; note = 2'-O-methylguanosine-3'-phosphate
  modified_base 14: mod_base = OTHER; note = 2'-deoxy-2'-fluoroadenosine-3'-phosphate
  modified_base 15: mod_base = OTHER; note = 2'-O-methylcytidine-3'-phosphate
  modified_base 16: mod_base = OTHER; note = 2'-deoxy-2'-fluorocytidine-3'-phosphate
  modified_base 17: mod_base = OTHER; note = 2'-O-methyluridine-3'-phosphate
  modified_base 18: mod_base = OTHER; note = 2'-O-methylcytidine-3'-phosphate
  modified_base 19: mod_base = OTHER; note = 2'-O-methyladenosine-3'-phosphate
  modified_base 20: mod_base = OTHER; note = 2'-O-methylcytidine-3'-phosphate
  modified_base 21: mod_base = OTHER; note = 2'-O-methyluridine-3'-phosphorothioate
  modified_base 22: mod_base = OTHER; note = 2'-O-methylcytidine-3'-phosphorothioate
  modified_base 23: mod_base = OTHER; note = 2'-O-methyluridine
ttttttctcattgacctcactct

SEQ ID NO: 13125 - RNA, 23 nt, synthetic construct
  source 1..23: mol_type = other RNA
  modified_base 1: mod_base = OTHER; note = 2'-O-methyluridine-3'-phosphorothioate 5'-(E)-Vinylphosphonate
  modified_base 2: mod_base = OTHER; note = 2'-deoxy-2'-fluorouridine-3'-phosphorothioate
  modified_base 3: mod_base = OTHER; note = 2'-O-methyladenosine-3'-phosphate
  modified_base 4: mod_base = OTHER; note = 2'-O-methyluridine-3'-phosphate
  modified_base 5: mod_base = OTHER; note = 2'-O-methylcytidine-3'-phosphate
  modified_base 6: mod_base = OTHER; note = 2'-deoxy-2'-fluorocytidine-3'-phosphate
  modified_base 7: mod_base = OTHER; note = 2'-O-methyladenosine-3'-phosphate
  modified_base 8: mod_base = OTHER; note = 2'-O-methyluridine-3'-phosphate
  modified_base 9: mod_base = OTHER; note = 2'-O-methyluridine-3'-phosphate
  modified_base 10: mod_base = OTHER; note = 2'-O-methyladenosine-3'-phosphate
  modified_base 11: mod_base = OTHER; note = 2'-O-methyladenosine-3'-phosphate
  modified_base 12: mod_base = OTHER; note = 2'-O-methyluridine-3'-phosphate
  modified_base 13: mod_base = OTHER; note = 2'-O-methyluridine-3'-phosphate
  modified_base 14: mod_base = OTHER; note = 2'-deoxy-2'-fluorouridine-3'-phosphate
  modified_base 15: mod_base = OTHER; note = 2'-O-methyluridine-3'-phosphate
  modified_base 16: mod_base = OTHER; note = 2'-deoxy-2'-fluoroadenosine-3'-phosphate
  modified_base 17: mod_base = OTHER; note = 2'-O-methyluridine-3'-phosphate
  modified_base 18: mod_base = OTHER; note = 2'-O-methylcytidine-3'-phosphate
  modified_base 19: mod_base = OTHER; note = 2'-O-methyladenosine-3'-phosphate
  modified_base 20: mod_base = OTHER; note = 2'-O-methylguanosine-3'-phosphate
  modified_base 21: mod_base = OTHER; note = 2'-O-methylcytidine-3'-phosphorothioate
  modified_base 22: mod_base = OTHER; note = 2'-O-methyladenosine-3'-phosphorothioate
  modified_base 23: mod_base = OTHER; note = 2'-O-methylcytidine
ttatccattaattttatcagcac

SEQ ID NO: 13126 - RNA, 23 nt, synthetic construct
  source 1..23: mol_type = other RNA
  modified_base 1: mod_base = OTHER; note = 2'-O-methyluridine-3'-phosphorothioate 5'-(E)-Vinylphosphonate
  modified_base 2: mod_base = OTHER; note = 2'-deoxy-2'-fluoroadenosine-3'-phosphorothioate
  modified_base 3: mod_base = OTHER; note = 2'-O-methyluridine-3'-phosphate
  modified_base 4: mod_base = OTHER; note = 2'-O-methyluridine-3'-phosphate
  modified_base 5: mod_base = OTHER; note = 2'-O-methylcytidine-3'-phosphate
  modified_base 6: mod_base = OTHER; note = 2'-deoxy-2'-fluorouridine-3'-phosphate
  modified_base 7: mod_base = OTHER; note = 2'-O-methyladenosine-3'-phosphate
  modified_base 8: mod_base = OTHER; note = 2'-O-methylcytidine-3'-phosphate
  modified_base 9: mod_base = OTHER; note = 2'-O-methyladenosine-3'-phosphate
  modified_base 10: mod_base = OTHER; note = 2'-O-methyladenosine-3'-phosphate
  modified_base 11: mod_base = OTHER; note = 2'-O-methylcytidine-3'-phosphate
  modified_base 12: mod_base = OTHER; note = 2'-O-methyluridine-3'-phosphate
  modified_base 13: mod_base = OTHER; note = 2'-O-methylcytidine-3'-phosphate
  modified_base 14: mod_base = OTHER; note = 2'-deoxy-2'-fluorouridine-3'-phosphate
  modified_base 15: mod_base = OTHER; note = 2'-O-methyluridine-3'-phosphate
  modified_base 16: mod_base = OTHER; note = 2'-deoxy-2'-fluorouridine-3'-phosphate
  modified_base 17: mod_base = OTHER; note = 2'-O-methylcytidine-3'-phosphate
  modified_base 18: mod_base = OTHER; note = 2'-O-methyluridine-3'-phosphate
  modified_base 19: mod_base = OTHER; note = 2'-O-methyluridine-3'-phosphate
  modified_base 20: mod_base = OTHER; note = 2'-O-methyladenosine-3'-phosphate
  modified_base 21: mod_base = OTHER; note = 2'-O-methylguanosine-3'-phosphorothioate
  modified_base 22: mod_base = OTHER; note = 2'-O-methylcytidine-3'-phosphorothioate
  modified_base 23: mod_base = OTHER; note = 2'-O-methylcytidine
tattctacaactctttcttagcc

SEQ ID NO: 13127 - RNA, 23 nt, synthetic construct
  source 1..23: mol_type = other RNA
  modified_base 1: mod_base = OTHER; note = 2'-O-methyluridine-3'-phosphorothioate 5'-(E)-Vinylphosphonate
  modified_base 2: mod_base = OTHER; note = 2'-deoxy-2'-fluoroadenosine-3'-phosphorothioate
  modified_base 3: mod_base = OTHER; note = 2'-O-methyladenosine-3'-phosphate
  modified_base 4: mod_base = OTHER; note = 2'-O-methylcytidine-3'-phosphate
  modified_base 5: mod_base = OTHER; note = 2'-O-methylcytidine-3'-phosphate
  modified_base 6: mod_base = OTHER; note = 2'-deoxy-2'-fluoroadenosine-3'-phosphate
  modified_base 7: mod_base = OTHER; note = 2'-O-methyluridine-3'-phosphate
  modified_base 8: mod_base = OTHER; note = 2'-O-methyluridine-3'-phosphate
  modified_base 9: mod_base = OTHER; note = 2'-O-methylcytidine-3'-phosphate
  modified_base 10: mod_base = OTHER; note = 2'-O-methyluridine-3'-phosphate
  modified_base 11: mod_base = OTHER; note = 2'-O-methyladenosine-3'-phosphate
  modified_base 12: mod_base = OTHER; note = 2'-O-methylcytidine-3'-phosphate
  modified_base 13: mod_base = OTHER; note = 2'-O-methyladenosine-3'-phosphate
  modified_base 14: mod_base = OTHER; note = 2'-deoxy-2'-fluoroadenosine-3'-phosphate
  modified_base 15: mod_base = OTHER; note = 2'-O-methylcytidine-3'-phosphate
  modified_base 16: mod_base = OTHER; note = 2'-deoxy-2'-fluorouridine-3'-phosphate
  modified_base 17: mod_base = OTHER; note = 2'-O-methylcytidine-3'-phosphate
  modified_base 18: mod_base = OTHER; note = 2'-O-methyluridine-3'-phosphate
  modified_base 19: mod_base = OTHER; note = 2'-O-methyluridine-3'-phosphate
  modified_base 20: mod_base = OTHER; note = 2'-O-methyluridine-3'-phosphate
  modified_base 21: mod_base = OTHER; note = 2'-O-methylcytidine-3'-phosphorothioate
  modified_base 22: mod_base = OTHER; note = 2'-O-methyluridine-3'-phosphorothioate
  modified_base 23: mod_base = OTHER; note = 2'-O-methyluridine
taaccattctacaactctttctt

SEQ ID NO: 13128 - RNA, 23 nt, synthetic construct
  source 1..23: mol_type = other RNA
  modified_base 1: mod_base = OTHER; note = 2'-O-methyluridine-3'-phosphorothioate 5'-(E)-Vinylphosphonate
  modified_base 2: mod_base = OTHER; note = 2'-deoxy-2'-fluorouridine-3'-phosphorothioate
  modified_base 3: mod_base = OTHER; note = 2'-O-methylcytidine-3'-phosphate
  modified_base 4: mod_base = OTHER; note = 2'-O-methylcytidine-3'-phosphate
  modified_base 5: mod_base = OTHER; note = 2'-O-methyladenosine-3'-phosphate
  modified_base 6: mod_base = OTHER; note = 2'-deoxy-2'-fluorouridine-3'-phosphate
  modified_base 7: mod_base = OTHER; note = 2'-O-methyluridine-3'-phosphate
  modified_base 8: mod_base = OTHER; note = 2'-O-methyladenosine-3'-phosphate
  modified_base 9: mod_base = OTHER; note = 2'-O-methyladenosine-3'-phosphate
  modified_base 10: mod_base = OTHER; note = 2'-O-methyluridine-3'-phosphate
  modified_base 11: mod_base = OTHER; note = 2'-O-methyluridine-3'-phosphate
  modified_base 12: mod_base = OTHER; note = 2'-O-methyluridine-3'-phosphate
  modified_base 13: mod_base = OTHER; note = 2'-O-methyluridine-3'-phosphate
  modified_base 14: mod_base = OTHER; note = 2'-deoxy-2'-fluoroadenosine-3'-phosphate
  modified_base 15: mod_base = OTHER; note = 2'-O-methyluridine-3'-phosphate
  modified_base 16: mod_base = OTHER; note = 2'-deoxy-2'-fluorocytidine-3'-phosphate
  modified_base 17: mod_base = OTHER; note = 2'-O-methyladenosine-3'-phosphate
  modified_base 18: mod_base = OTHER; note = 2'-O-methylguanosine-3'-phosphate
  modified_base 19: mod_base = OTHER; note = 2'-O-methylcytidine-3'-phosphate
  modified_base 20: mod_base = OTHER; note = 2'-O-methyladenosine-3'-phosphate
  modified_base 21: mod_base = OTHER; note = 2'-O-methylcytidine-3'-phosphorothioate
  modified_base 22: mod_base = OTHER; note = 2'-O-methylcytidine-3'-phosphorothioate
  modified_base 23: mod_base = OTHER; note = 2'-O-methylcytidine
ttccattaattttatcagcaccc

SEQ ID NO: 13129 - RNA, 23 nt, synthetic construct
  source 1..23: mol_type = other RNA
  modified_base 1: mod_base = OTHER; note = 2'-O-methyluridine-3'-phosphorothioate 5'-(E)-Vinylphosphonate
  modified_base 2: mod_base = OTHER; note = 2'-deoxy-2'-fluoroadenosine-3'-phosphorothioate
  modified_base 3: mod_base = OTHER; note = 2'-O-methyluridine-3'-phosphate
  modified_base 4: mod_base = OTHER; note = 2'-O-methylcytidine-3'-phosphate
  modified_base 5: mod_base = OTHER; note = 2'-O-methylcytidine-3'-phosphate
  modified_base 6: mod_base = OTHER; note = 2'-deoxy-2'-fluoroadenosine-3'-phosphate
  modified_base 7: mod_base = OTHER; note = 2'-O-methyluridine-3'-phosphate
  modified_base 8: mod_base = OTHER; note = 2'-O-methyluridine-3'-phosphate
  modified_base 9: mod_base = OTHER; note = 2'-O-methyladenosine-3'-phosphate
  modified_base 10: mod_base = OTHER; note = 2'-O-methyladenosine-3'-phosphate
  modified_base 11: mod_base = OTHER; note = 2'-O-methyluridine-3'-phosphate
  modified_base 12: mod_base = OTHER; note = 2'-O-methyluridine-3'-phosphate
  modified_base 13: mod_base = OTHER; note = 2'-O-methyluridine-3'-phosphate
  modified_base 14: mod_base = OTHER; note = 2'-deoxy-2'-fluorouridine-3'-phosphate
  modified_base 15: mod_base = OTHER; note = 2'-O-methyladenosine-3'-phosphate
  modified_base 16: mod_base = OTHER; note = 2'-deoxy-2'-fluorouridine-3'-phosphate
  modified_base 17: mod_base = OTHER; note = 2'-O-methylcytidine-3'-phosphate
  modified_base 18: mod_base = OTHER; note = 2'-O-methyladenosine-3'-phosphate
  modified_base 19: mod_base = OTHER; note = 2'-O-methylguanosine-3'-phosphate
  modified_base 20: mod_base = OTHER; note = 2'-O-methylcytidine-3'-phosphate
  modified_base 21: mod_base = OTHER; note = 2'-O-methyladenosine-3'-phosphorothioate
  modified_base 22: mod_base = OTHER; note = 2'-O-methylcytidine-3'-phosphorothioate
  modified_base 23: mod_base = OTHER; note = 2'-O-methylcytidine
tatccattaattttatcagcacc

SEQ ID NO: 13130 - RNA, 23 nt, synthetic construct
  source 1..23: mol_type = other RNA
  modified_base 1: mod_base = OTHER; note = 2'-O-methyluridine-3'-phosphorothioate 5'-(E)-Vinylphosphonate
  modified_base 2: mod_base = OTHER; note = 2'-deoxy-2'-fluoroadenosine-3'-phosphorothioate
  modified_base 3: mod_base = OTHER; note = 2'-O-methylguanosine-3'-phosphate
  modified_base 4: mod_base = OTHER; note = 2'-O-methyladenosine-3'-phosphate
  modified_base 5: mod_base = OTHER; note = 2'-O-methyladenosine-3'-phosphate
  modified_base 6: mod_base = OTHER; note = 2'-deoxy-2'-fluoroadenosine-3'-phosphate
  modified_base 7: mod_base = OTHER; note = 2'-O-methyluridine-3'-phosphate
  modified_base 8: mod_base = OTHER; note = 2'-O-methyluridine-3'-phosphate
  modified_base 9: mod_base = OTHER; note = 2'-O-methylcytidine-3'-phosphate
  modified_base 10: mod_base = OTHER; note = 2'-O-methyluridine-3'-phosphate
  modified_base 11: mod_base = OTHER; note = 2'-O-methyladenosine-3'-phosphate
  modified_base 12: mod_base = OTHER; note = 2'-O-methyluridine-3'-phosphate
  modified_base 13: mod_base = OTHER; note = 2'-O-methyladenosine-3'-phosphate
  modified_base 14: mod_base = OTHER; note = 2'-deoxy-2'-fluorocytidine-3'-phosphate
  modified_base 15: mod_base = OTHER; note = 2'-O-methyluridine-3'-phosphate
  modified_base 16: mod_base = OTHER; note = 2'-deoxy-2'-fluorocytidine-3'-phosphate
  modified_base 17: mod_base = OTHER; note = 2'-O-methyluridine-3'-phosphate
  modified_base 18: mod_base = OTHER; note = 2'-O-methylcytidine-3'-phosphate
  modified_base 19: mod_base = OTHER; note = 2'-O-methyladenosine-3'-phosphate
  modified_base 20: mod_base = OTHER; note = 2'-O-methylcytidine-3'-phosphate
  modified_base 21: mod_base = OTHER; note = 2'-O-methyladenosine-3'-phosphorothioate
  modified_base 22: mod_base = OTHER; note = 2'-O-methylguanosine-3'-phosphorothioate
  modified_base 23: mod_base = OTHER; note = 2'-O-methyluridine
tagaaattctatactctcacagt

SEQ ID NO: 13131 - RNA, 23 nt, synthetic construct
  source 1..23: mol_type = other RNA
  modified_base 1: mod_base = OTHER; note = 2'-O-methyluridine-3'-phosphorothioate 5'-(E)-Vinylphosphonate
  modified_base 2: mod_base = OTHER; note = 2'-deoxy-2'-fluorouridine-3'-phosphorothioate
  modified_base 3: mod_base = OTHER; note = 2'-O-methyluridine-3'-phosphate
  modified_base 4: mod_base = OTHER; note = 2'-O-methylcytidine-3'-phosphate
  modified_base 5: mod_base = OTHER; note = 2'-O-methyluridine-3'-phosphate
  modified_base 6: mod_base = OTHER; note = 2'-deoxy-2'-fluoroadenosine-3'-phosphate
  modified_base 7: mod_base = OTHER; note = 2'-O-methyluridine-3'-phosphate
  modified_base 8: mod_base = OTHER; note = 2'-O-methyladenosine-3'-phosphate
  modified_base 9: mod_base = OTHER; note = 2'-O-methylcytidine-3'-phosphate
  modified_base 10: mod_base = OTHER; note = 2'-O-methyluridine-3'-phosphate
  modified_base 11: mod_base = OTHER; note = 2'-O-methylcytidine-3'-phosphate
  modified_base 12: mod_base = OTHER; note = 2'-O-methyluridine-3'-phosphate
  modified_base 13: mod_base = OTHER; note = 2'-O-methylcytidine-3'-phosphate
  modified_base 14: mod_base = OTHER; note = 2'-deoxy-2'-fluoroadenosine-3'-phosphate
  modified_base 15: mod_base = OTHER; note = 2'-O-methylcytidine-3'-phosphate
  modified_base 16: mod_base = OTHER; note = 2'-deoxy-2'-fluoroadenosine-3'-phosphate
  modified_base 17: mod_base = OTHER; note = 2'-O-methylguanosine-3'-phosphate
  modified_base 18: mod_base = OTHER; note = 2'-O-methyluridine-3'-phosphate
  modified_base 19: mod_base = OTHER; note = 2'-O-methyluridine-3'-phosphate
  modified_base 20: mod_base = OTHER; note = 2'-O-methylcytidine-3'-phosphate
  modified_base 21: mod_base = OTHER; note = 2'-O-methylcytidine-3'-phosphorothioate
  modified_base 22: mod_base = OTHER; note = 2'-O-methyluridine-3'-phosphorothioate
  modified_base 23: mod_base = OTHER; note = 2'-O-methyladenosine
tttctatactctcacagttccta

SEQ ID NO: 13132 - RNA, 23 nt, synthetic construct
  source 1..23: mol_type = other RNA
  modified_base 1: mod_base = OTHER; note = 2'-O-methyluridine-3'-phosphorothioate 5'-(E)-Vinylphosphonate
  modified_base 2: mod_base = OTHER; note = 2'-deoxy-2'-fluoroadenosine-3'-phosphorothioate
  modified_base 3: mod_base = OTHER; note = 2'-O-methyluridine-3'-phosphate
  modified_base 4: mod_base = OTHER; note = 2'-O-methyluridine-3'-phosphate
  modified_base 5: mod_base = OTHER; note = 2'-O-methylcytidine-3'-phosphate
  modified_base 6: mod_base = OTHER; note = 2'-deoxy-2'-fluorouridine-3'-phosphate
  modified_base 7: mod_base = OTHER; note = 2'-O-methyladenosine-3'-phosphate
  modified_base 8: mod_base = OTHER; note = 2'-O-methyluridine-3'-phosphate
  modified_base 9: mod_base = OTHER; note = 2'-O-methyladenosine-3'-phosphate
  modified_base 10: mod_base = OTHER; note = 2'-O-methylcytidine-3'-phosphate
  modified_base 11: mod_base = OTHER; note = 2'-O-methyluridine-3'-phosphate
  modified_base 12: mod_base = OTHER; note = 2'-O-methylcytidine-3'-phosphate
  modified_base 13: mod_base = OTHER; note = 2'-O-methyluridine-3'-phosphate
  modified_base 14: mod_base = OTHER; note = 2'-deoxy-2'-fluorocytidine-3'-phosphate
  modified_base 15: mod_base = OTHER; note = 2'-O-methyladenosine-3'-phosphate
  modified_base 16: mod_base = OTHER; note = 2'-deoxy-2'-fluorocytidine-3'-phosphate
  modified_base 17: mod_base = OTHER; note = 2'-O-methyladenosine-3'-phosphate
  modified_base 18: mod_base = OTHER; note = 2'-O-methylguanosine-3'-phosphate
  modified_base 19: mod_base = OTHER; note = 2'-O-methyluridine-3'-phosphate
  modified_base 20: mod_base = OTHER; note = 2'-O-methyluridine-3'-phosphate
  modified_base 21: mod_base = OTHER; note = 2'-O-methylcytidine-3'-phosphorothioate
  modified_base 22: mod_base = OTHER; note = 2'-O-methylcytidine-3'-phosphorothioate
  modified_base 23: mod_base = OTHER; note = 2'-O-methyluridine
tattctatactctcacagttcct

SEQ ID NO: 13133 - RNA, 23 nt, synthetic construct
  source 1..23: mol_type = other RNA
  modified_base 1: mod_base = OTHER; note = 2'-O-methyluridine-3'-phosphorothioate 5'-(E)-Vinylphosphonate
  modified_base 2: mod_base = OTHER; note = 2'-deoxy-2'-fluoroadenosine-3'-phosphorothioate
  modified_base 3: mod_base = OTHER; note = 2'-O-methyladenosine-3'-phosphate
  modified_base 4: mod_base = OTHER; note = 2'-O-methyluridine-3'-phosphate
  modified_base 5: mod_base = OTHER; note = 2'-O-methyluridine-3'-phosphate
  modified_base 6: mod_base = OTHER; note = 2'-deoxy-2'-fluorocytidine-3'-phosphate
  modified_base 7: mod_base = OTHER; note = 2'-O-methyluridine-3'-phosphate
  modified_base 8: mod_base = OTHER; note = 2'-O-methyladenosine-3'-phosphate
  modified_base 9: mod_base = OTHER; note = 2'-O-methyluridine-3'-phosphate
  modified_base 10: mod_base = OTHER; note = 2'-O-methyladenosine-3'-phosphate
  modified_base 11: mod_base = OTHER; note = 2'-O-methylcytidine-3'-phosphate
  modified_base 12: mod_base = OTHER; note = 2'-O-methyluridine-3'-phosphate
  modified_base 13: mod_base = OTHER; note = 2'-O-methylcytidine-3'-phosphate
  modified_base 14: mod_base = OTHER; note = 2'-deoxy-2'-fluorouridine-3'-phosphate
  modified_base 15: mod_base = OTHER; note = 2'-O-methylcytidine-3'-phosphate
  modified_base 16: mod_base = OTHER; note = 2'-deoxy-2'-fluoroadenosine-3'-phosphate
  modified_base 17: mod_base = OTHER; note = 2'-O-methylcytidine-3'-phosphate
  modified_base 18: mod_base = OTHER; note = 2'-O-methyladenosine-3'-phosphate
  modified_base 19: mod_base = OTHER; note = 2'-O-methylguanosine-3'-phosphate
  modified_base 20: mod_base = OTHER; note = 2'-O-methyluridine-3'-phosphate
  modified_base 21: mod_base = OTHER; note = 2'-O-methyluridine-3'-phosphorothioate
  modified_base 22: mod_base = OTHER; note = 2'-O-methylcytidine-3'-phosphorothioate
  modified_base 23: mod_base = OTHER; note = 2'-O-methylcytidine
taattctatactctcacagttcc

SEQ ID NO: 13134 - RNA, 23 nt, synthetic construct
  source 1..23: mol_type = other RNA
  modified_base 1: mod_base = OTHER; note = 2'-O-methyluridine-3'-phosphorothioate 5'-(E)-Vinylphosphonate
  modified_base 2: mod_base = OTHER; note = 2'-deoxy-2'-fluoroadenosine-3'-phosphorothioate
  modified_base 3: mod_base = OTHER; note = 2'-O-methyladenosine-3'-phosphate
  modified_base 4: mod_base = OTHER; note = 2'-O-methyladenosine-3'-phosphate
  modified_base 5: mod_base = OTHER; note = 2'-O-methyluridine-3'-phosphate
  modified_base 6: mod_base = OTHER; note = 2'-deoxy-2'-fluorouridine-3'-phosphate
  modified_base 7: mod_base = OTHER; note = 2'-O-methylcytidine-3'-phosphate
  modified_base 8: mod_base = OTHER; note = 2'-O-methyluridine-3'-phosphate
  modified_base 9: mod_base = OTHER; note = 2'-O-methyladenosine-3'-phosphate
  modified_base 10: mod_base = OTHER; note = 2'-O-methyluridine-3'-phosphate
  modified_base 11: mod_base = OTHER; note = 2'-O-methyladenosine-3'-phosphate
  modified_base 12: mod_base = OTHER; note = 2'-O-methylcytidine-3'-phosphate
  modified_base 13: mod_base = OTHER; note = 2'-O-methyluridine-3'-phosphate
  modified_base 14: mod_base = OTHER; note = 2'-deoxy-2'-fluorocytidine-3'-phosphate
  modified_base 15: mod_base = OTHER; note = 2'-O-methyluridine-3'-phosphate
  modified_base 16: mod_base = OTHER; note = 2'-deoxy-2'-fluorocytidine-3'-phosphate
  modified_base 17: mod_base = OTHER; note = 2'-O-methyladenosine-3'-phosphate
  modified_base 18: mod_base = OTHER; note = 2'-O-methylcytidine-3'-phosphate
  modified_base 19: mod_base = OTHER; note = 2'-O-methyladenosine-3'-phosphate
  modified_base 20: mod_base = OTHER; note = 2'-O-methylguanosine-3'-phosphate
  modified_base 21: mod_base = OTHER; note = 2'-O-methyluridine-3'-phosphorothioate
  modified_base 22: mod_base = OTHER; note = 2'-O-methyluridine-3'-phosphorothioate
  modified_base 23: mod_base = OTHER; note = 2'-O-methylcytidine
taaattctatactctcacagttc

SEQ ID NO: 13135 - RNA, 23 nt, synthetic construct
  source 1..23: mol_type = other RNA
  modified_base 1: mod_base = OTHER; note = 2'-O-methyluridine-3'-phosphorothioate 5'-(E)-Vinylphosphonate
  modified_base 2: mod_base = OTHER; note = 2'-deoxy-2'-fluoroguanosine-3'-phosphorothioate
  modified_base 3: mod_base = OTHER; note = 2'-O-methyladenosine-3'-phosphate
  modified_base 4: mod_base = OTHER; note = 2'-O-methyladenosine-3'-phosphate
  modified_base 5: mod_base = OTHER; note = 2'-O-methyladenosine-3'-phosphate
  modified_base 6: mod_base = OTHER; note = 2'-deoxy-2'-fluorouridine-3'-phosphate
  modified_base 7: mod_base = OTHER; note = 2'-O-methyluridine-3'-phosphate
  modified_base 8: mod_base = OTHER; note = 2'-O-methylcytidine-3'-phosphate
  modified_base 9: mod_base = OTHER; note = 2'-O-methyluridine-3'-phosphate
  modified_base 10: mod_base = OTHER; note = 2'-O-methyladenosine-3'-phosphate
  modified_base 11: mod_base = OTHER; note = 2'-O-methyluridine-3'-phosphate
  modified_base 12: mod_base = OTHER; note = 2'-O-methyladenosine-3'-phosphate
  modified_base 13: mod_base = OTHER; note = 2'-O-methylcytidine-3'-phosphate
  modified_base 14: mod_base = OTHER; note = 2'-deoxy-2'-fluorouridine-3'-phosphate
  modified_base 15: mod_base = OTHER; note = 2'-O-methylcytidine-3'-phosphate
  modified_base 16: mod_base = OTHER; note = 2'-deoxy-2'-fluorouridine-3'-phosphate
  modified_base 17: mod_base = OTHER; note = 2'-O-methylcytidine-3'-phosphate
  modified_base 18: mod_base = OTHER; note = 2'-O-methyladenosine-3'-phosphate
  modified_base 19: mod_base = OTHER; note = 2'-O-methylcytidine-3'-phosphate
  modified_base 20: mod_base = OTHER; note = 2'-O-methyladenosine-3'-phosphate
  modified_base 21: mod_base = OTHER; note = 2'-O-methylguanosine-3'-phosphorothioate
  modified_base 22: mod_base = OTHER; note = 2'-O-methyluridine-3'-phosphorothioate
  modified_base 23: mod_base = OTHER; note = 2'-O-methyluridine
tgaaattctatactctcacagtt

SEQ ID NO: 13136 - RNA, 23 nt, synthetic construct
  source 1..23: mol_type = other RNA
  modified_base 1: mod_base = OTHER; note = 2'-O-methyluridine-3'-phosphorothioate 5'-(E)-Vinylphosphonate
  modified_base 2: mod_base = OTHER; note = 2'-deoxy-2'-fluoroadenosine-3'-phosphorothioate
  modified_base 3: mod_base = OTHER; note = 2'-O-methyladenosine-3'-phosphate
  modified_base 4: mod_base = OTHER; note = 2'-O-methylguanosine-3'-phosphate
  modified_base 5: mod_base = OTHER; note = 2'-O-methyladenosine-3'-phosphate
  modified_base 6: mod_base = OTHER; note = 2'-deoxy-2'-fluoroadenosine-3'-phosphate
  modified_base 7: mod_base = OTHER; note = 2'-O-methyladenosine-3'-phosphate
  modified_base 8: mod_base = OTHER; note = 2'-O-methyluridine-3'-phosphate
  modified_base 9: mod_base = OTHER; note = 2'-O-methyluridine-3'-phosphate
  modified_base 10: mod_base = OTHER; note = 2'-O-methylcytidine-3'-phosphate
  modified_base 11: mod_base = OTHER; note = 2'-O-methyluridine-3'-phosphate
  modified_base 12: mod_base = OTHER; note = 2'-O-methyladenosine-3'-phosphate
  modified_base 13: mod_base = OTHER; note = 2'-O-methyluridine-3'-phosphate
  modified_base 14: mod_base = OTHER; note = 2'-deoxy-2'-fluoroadenosine-3'-phosphate
  modified_base 15: mod_base = OTHER; note = 2'-O-methylcytidine-3'-phosphate
  modified_base 16: mod_base = OTHER; note = 2'-deoxy-2'-fluorouridine-3'-phosphate
  modified_base 17: mod_base = OTHER; note = 2'-O-methylcytidine-3'-phosphate
  modified_base 18: mod_base = OTHER; note = 2'-O-methyluridine-3'-phosphate
  modified_base 19: mod_base = OTHER; note = 2'-O-methylcytidine-3'-phosphate
  modified_base 20: mod_base = OTHER; note = 2'-O-methyladenosine-3'-phosphate
  modified_base 21: mod_base = OTHER; note = 2'-O-methylcytidine-3'-phosphorothioate
  modified_base 22: mod_base = OTHER; note = 2'-O-methyladenosine-3'-phosphorothioate
  modified_base 23: mod_base = OTHER; note = 2'-O-methylguanosine
taagaaattctatactctcacag

SEQ ID NO: 13137 - RNA, 23 nt, synthetic construct
  source 1..23: mol_type = other RNA
  modified_base 1: mod_base = OTHER; note = 2'-O-methyluridine-3'-phosphorothioate 5'-(E)-Vinylphosphonate
  modified_base 2: mod_base = OTHER; note = 2'-deoxy-2'-fluorouridine-3'-phosphorothioate
  modified_base 3: mod_base = OTHER; note = 2'-O-methyladenosine-3'-phosphate
  modified_base 4: mod_base = OTHER; note = 2'-O-methyladenosine-3'-phosphate
  modified_base 5: mod_base = OTHER; note = 2'-O-methylguanosine-3'-phosphate
  modified_base 6: mod_base = OTHER; note = 2'-deoxy-2'-fluoroadenosine-3'-phosphate
  modified_base 7: mod_base = OTHER; note = 2'-O-methyladenosine-3'-phosphate
  modified_base 8: mod_base = OTHER; note = 2'-O-methyladenosine-3'-phosphate
  modified_base 9: mod_base = OTHER; note = 2'-O-methyluridine-3'-phosphate
  modified_base 10: mod_base = OTHER; note = 2'-O-methyluridine-3'-phosphate
  modified_base 11: mod_base = OTHER; note = 2'-O-methylcytidine-3'-phosphate
  modified_base 12: mod_base = OTHER; note = 2'-O-methyluridine-3'-phosphate
  modified_base 13: mod_base = OTHER; note = 2'-O-methyladenosine-3'-phosphate
  modified_base 14: mod_base = OTHER; note = 2'-deoxy-2'-fluorouridine-3'-phosphate
  modified_base 15: mod_base = OTHER; note = 2'-O-methyladenosine-3'-phosphate
  modified_base 16: mod_base = OTHER; note = 2'-deoxy-2'-fluorocytidine-3'-phosphate
  modified_base 17: mod_base = OTHER; note = 2'-O-methyluridine-3'-phosphate
  modified_base 18: mod_base = OTHER; note = 2'-O-methylcytidine-3'-phosphate
  modified_base 19: mod_base = OTHER; note = 2'-O-methyluridine-3'-phosphate
  modified_base 20: mod_base = OTHER; note = 2'-O-methylcytidine-3'-phosphate
  modified_base 21: mod_base = OTHER; note = 2'-O-methyladenosine-3'-phosphorothioate
  modified_base 22: mod_base = OTHER; note = 2'-O-methylcytidine-3'-phosphorothioate
  modified_base 23: mod_base = OTHER; note = 2'-O-methyladenosine
ttaagaaattctatactctcaca

SEQ ID NO: 13138 - RNA, 23 nt, synthetic construct
  source 1..23: mol_type = other RNA
  modified_base 1: mod_base = OTHER; note = 2'-O-methyluridine-3'-phosphorothioate 5'-(E)-Vinylphosphonate
  modified_base 2: mod_base = OTHER; note = 2'-deoxy-2'-fluorocytidine-3'-phosphorothioate
  modified_base 3: mod_base = OTHER; note = 2'-O-methyluridine-3'-phosphate
  modified_base 4: mod_base = OTHER; note = 2'-O-methyladenosine-3'-phosphate
  modified_base 5: mod_base = OTHER; note = 2'-O-methyladenosine-3'-phosphate
  modified_base 6: mod_base = OTHER; note = 2'-deoxy-2'-fluoroguanosine-3'-phosphate
  modified_base 7: mod_base = OTHER; note = 2'-O-methyladenosine-3'-phosphate
  modified_base 8: mod_base = OTHER; note = 2'-O-methyladenosine-3'-phosphate
  modified_base 9: mod_base = OTHER; note = 2'-O-methyladenosine-3'-phosphate
  modified_base 10: mod_base = OTHER; note = 2'-O-methyluridine-3'-phosphate
  modified_base 11: mod_base = OTHER; note = 2'-O-methyluridine-3'-phosphate
  modified_base 12: mod_base = OTHER; note = 2'-O-methylcytidine-3'-phosphate
  modified_base 13: mod_base = OTHER; note = 2'-O-methyluridine-3'-phosphate
  modified_base 14: mod_base = OTHER; note = 2'-deoxy-2'-fluoroadenosine-3'-phosphate
  modified_base 15: mod_base = OTHER; note = 2'-O-methyluridine-3'-phosphate
  modified_base 16: mod_base = OTHER; note = 2'-deoxy-2'-fluoroadenosine-3'-phosphate
  modified_base 17: mod_base = OTHER; note = 2'-O-methylcytidine-3'-phosphate
  modified_base 18: mod_base = OTHER; note = 2'-O-methyluridine-3'-phosphate
  modified_base 19: mod_base = OTHER; note = 2'-O-methylcytidine-3'-phosphate
  modified_base 20: mod_base = OTHER; note = 2'-O-methyluridine-3'-phosphate
  modified_base 21: mod_base = OTHER; note = 2'-O-methylcytidine-3'-phosphorothioate
  modified_base 22: mod_base = OTHER; note = 2'-O-methyladenosine-3'-phosphorothioate
  modified_base 23: mod_base = OTHER; note = 2'-O-methylcytidine
tctaagaaattctatactctcac

SEQ ID NO: 13139 - RNA, 23 nt, synthetic construct
  source 1..23: mol_type = other RNA
  modified_base 1: mod_base = OTHER; note = 2'-O-methyluridine-3'-phosphorothioate 5'-(E)-Vinylphosphonate
  modified_base 2: mod_base = OTHER; note = 2'-deoxy-2'-fluoroadenosine-3'-phosphorothioate
  modified_base 3: mod_base = OTHER; note = 2'-O-methylcytidine-3'-phosphate
  modified_base 4: mod_base = OTHER; note = 2'-O-methyluridine-3'-phosphate
  modified_base 5: mod_base = OTHER; note = 2'-O-methyladenosine-3'-phosphate
  modified_base 6: mod_base = OTHER; note = 2'-deoxy-2'-fluoroadenosine-3'-phosphate
  modified_base 7: mod_base = OTHER; note = 2'-O-methylguanosine-3'-phosphate
  modified_base 8: mod_base = OTHER; note = 2'-O-methyladenosine-3'-phosphate
  modified_base 9: mod_base = OTHER; note = 2'-O-methyladenosine-3'-phosphate
  modified_base 10: mod_base = OTHER; note = 2'-O-methyladenosine-3'-phosphate
  modified_base 11: mod_base = OTHER; note = 2'-O-methyluridine-3'-phosphate
  modified_base 12: mod_base = OTHER; note = 2'-O-methyluridine-3'-phosphate
  modified_base 13: mod_base = OTHER; note = 2'-O-methylcytidine-3'-phosphate
  modified_base 14: mod_base = OTHER; note = 2'-deoxy-2'-fluorouridine-3'-phosphate
  modified_base 15: mod_base = OTHER; note = 2'-O-methyladenosine-3'-phosphate
  modified_base 16: mod_base = OTHER; note = 2'-deoxy-2'-fluorouridine-3'-phosphate
  modified_base 17: mod_base = OTHER; note = 2'-O-methyladenosine-3'-phosphate
  modified_base 18: mod_base = OTHER; note = 2'-O-methylcytidine-3'-phosphate
  modified_base 19: mod_base = OTHER; note = 2'-O-methyluridine-3'-phosphate
  modified_base 20: mod_base = OTHER; note = 2'-O-methylcytidine-3'-phosphate
  modified_base 21: mod_base = OTHER; note = 2'-O-methyluridine-3'-phosphorothioate
  modified_base 22: mod_base = OTHER; note = 2'-O-methylcytidine-3'-phosphorothioate
  modified_base 23: mod_base = OTHER; note = 2'-O-methyladenosine
tactaagaaattctatactctca

SEQ ID NO: 13140 - RNA, 23 nt, synthetic construct
  source 1..23: mol_type = other RNA
  modified_base 1: mod_base = OTHER; note = 2'-O-methyluridine-3'-phosphorothioate 5'-(E)-Vinylphosphonate
  modified_base 2: mod_base = OTHER; note = 2'-deoxy-2'-fluorocytidine-3'-phosphorothioate
  modified_base 3: mod_base = OTHER; note = 2'-O-methyladenosine-3'-phosphate
  modified_base 4: mod_base = OTHER; note = 2'-O-methylcytidine-3'-phosphate
  modified_base 5: mod_base = OTHER; note = 2'-O-methyluridine-3'-phosphate
  modified_base 6: mod_base = OTHER; note = 2'-deoxy-2'-fluoroadenosine-3'-phosphate
  modified_base 7: mod_base = OTHER; note = 2'-O-methyladenosine-3'-phosphate
  modified_base 8: mod_base = OTHER; note = 2'-O-methylguanosine-3'-phosphate
  modified_base 9: mod_base = OTHER; note = 2'-O-methyladenosine-3'-phosphate
  modified_base 10: mod_base = OTHER; note = 2'-O-methyladenosine-3'-phosphate
  modified_base 11: mod_base = OTHER; note = 2'-O-methyladenosine-3'-phosphate
  modified_base 12: mod_base = OTHER; note = 2'-O-methyluridine-3'-phosphate
  modified_base 13: mod_base = OTHER; note = 2'-O-methyluridine-3'-phosphate
  modified_base 14: mod_base = OTHER; note = 2'-deoxy-2'-fluorocytidine-3'-phosphate
  modified_base 15: mod_base = OTHER; note = 2'-O-methyluridine-3'-phosphate
  modified_base 16: mod_base = OTHER; note = 2'-deoxy-2'-fluoroadenosine-3'-phosphate
  modified_base 17: mod_base = OTHER; note = 2'-O-methyluridine-3'-phosphate
  modified_base 18: mod_base = OTHER; note = 2'-O-methyladenosine-3'-phosphate
  modified_base 19: mod_base = OTHER; note = 2'-O-methylcytidine-3'-phosphate
  modified_base 20: mod_base = OTHER; note = 2'-O-methyluridine-3'-phosphate
  modified_base 21: mod_base = OTHER; note = 2'-O-methylcytidine-3'-phosphorothioate
  modified_base 22: mod_base = OTHER; note = 2'-O-methyluridine-3'-phosphorothioate
  modified_base 23: mod_base = OTHER; note = 2'-O-methylcytidine
tcactaagaaattctatactctc

SEQ ID NO: 13141 - RNA, 23 nt, synthetic construct
  source 1..23: mol_type = other RNA
  modified_base 1: mod_base = OTHER; note = 2'-O-methyluridine-3'-phosphorothioate 5'-(E)-Vinylphosphonate
  modified_base 2: mod_base = OTHER; note = 2'-deoxy-2'-fluoroguanosine-3'-phosphorothioate
  modified_base 3: mod_base = OTHER; note = 2'-O-methylcytidine-3'-phosphate
  modified_base 4: mod_base = OTHER; note = 2'-O-methyladenosine-3'-phosphate
  modified_base 5: mod_base = OTHER; note = 2'-O-methylcytidine-3'-phosphate
  modified_base 6: mod_base = OTHER; note = 2'-deoxy-2'-fluorouridine-3'-phosphate
  modified_base 7: mod_base = OTHER; note = 2'-O-methyladenosine-3'-phosphate
  modified_base 8: mod_base = OTHER; note = 2'-O-methyladenosine-3'-phosphate
  modified_base 9: mod_base = OTHER; note = 2'-O-methylguanosine-3'-phosphate
  modified_base 10: mod_base = OTHER; note = 2'-O-methyladenosine-3'-phosphate
  modified_base 11: mod_base = OTHER; note = 2'-O-methyladenosine-3'-phosphate
  modified_base 12: mod_base = OTHER; note = 2'-O-methyladenosine-3'-phosphate
  modified_base 13: mod_base = OTHER; note = 2'-O-methyluridine-3'-phosphate
  modified_base 14: mod_base = OTHER; note = 2'-deoxy-2'-fluorouridine-3'-phosphate
  modified_base 15: mod_base = OTHER; note = 2'-O-methylcytidine-3'-phosphate
  modified_base 16: mod_base = OTHER; note = 2'-deoxy-2'-fluorouridine-3'-phosphate
  modified_base 17: mod_base = OTHER; note = 2'-O-methyladenosine-3'-phosphate
  modified_base 18: mod_base = OTHER; note = 2'-O-methyluridine-3'-phosphate
  modified_base 19: mod_base = OTHER; note = 2'-O-methyladenosine-3'-phosphate
  modified_base 20: mod_base = OTHER; note = 2'-O-methylcytidine-3'-phosphate
  modified_base 21: mod_base = OTHER; note = 2'-O-methyluridine-3'-phosphorothioate
  modified_base 22: mod_base = OTHER; note = 2'-O-methylcytidine-3'-phosphorothioate
  modified_base 23: mod_base = OTHER; note = 2'-O-methyluridine
tgcactaagaaattctatactct

SEQ ID NO: 13142 - RNA, 23 nt, synthetic construct
  source 1..23: mol_type = other RNA
  modified_base 1: mod_base = OTHER; note = 2'-O-methyluridine-3'-phosphorothioate 5'-(E)-Vinylphosphonate
  modified_base 2: mod_base = OTHER; note = 2'-deoxy-2'-fluorouridine-3'-phosphorothioate
  modified_base 3: mod_base = OTHER; note = 2'-O-methylguanosine-3'-phosphate
  modified_base 4: mod_base = OTHER; note = 2'-O-methylcytidine-3'-phosphate
  modified_base 5: mod_base = OTHER; note = 2'-O-methyladenosine-3'-phosphate
  modified_base 6: mod_base = OTHER; note = 2'-deoxy-2'-fluorocytidine-3'-phosphate
  modified_base 7: mod_base = OTHER; note = 2'-O-methyluridine-3'-phosphate
  modified_base 8: mod_base = OTHER; note = 2'-O-methyladenosine-3'-phosphate
  modified_base 9: mod_base = OTHER; note = 2'-O-methyladenosine-3'-phosphate
  modified_base 10: mod_base = OTHER; note = 2'-O-methylguanosine-3'-phosphate
  modified_base 11: mod_base = OTHER; note = 2'-O-methyladenosine-3'-phosphate
  modified_base 12: mod_base = OTHER; note = 2'-O-methyladenosine-3'-phosphate
  modified_base 13: mod_base = OTHER; note = 2'-O-methyladenosine-3'-phosphate
  modified_base 14: mod_base = OTHER; note = 2'-deoxy-2'-fluorouridine-3'-phosphate
  modified_base 15: mod_base = OTHER; note = 2'-O-methyluridine-3'-phosphate
  modified_base 16: mod_base = OTHER; note = 2'-deoxy-2'-fluorocytidine-3'-phosphate
  modified_base 17: mod_base = OTHER; note = 2'-O-methyluridine-3'-phosphate
  modified_base 18: mod_base = OTHER; note = 2'-O-methyladenosine-3'-phosphate
  modified_base 19: mod_base = OTHER; note = 2'-O-methyluridine-3'-phosphate
  modified_base 20: mod_base = OTHER; note = 2'-O-methyladenosine-3'-phosphate
  modified_base 21: mod_base = OTHER; note = 2'-O-methylcytidine-3'-phosphorothioate
  modified_base 22: mod_base = OTHER; note = 2'-O-methyluridine-3'-phosphorothioate
  modified_base 23: mod_base = OTHER; note = 2'-O-methylcytidine
ttgcactaagaaattctatactc

SEQ ID NO: 13143 - RNA, 23 nt, synthetic construct
  source 1..23: mol_type = other RNA
  modified_base 1: mod_base = OTHER; note = 2'-O-methyluridine-3'-phosphorothioate 5'-(E)-Vinylphosphonate
  modified_base 2: mod_base = OTHER; note = 2'-deoxy-2'-fluoroguanosine-3'-phosphorothioate
  modified_base 3: mod_base = OTHER; note = 2'-O-methyladenosine-3'-phosphate
  modified_base 4: mod_base = OTHER; note = 2'-O-methylguanosine-3'-phosphate
  modified_base 5: mod_base = OTHER; note = 2'-O-methyladenosine-3'-phosphate
  modified_base 6: mod_base = OTHER; note = 2'-deoxy-2'-fluoroadenosine-3'-phosphate
  modified_base 7: mod_base = OTHER; note = 2'-O-methyladenosine-3'-phosphate
  modified_base 8: mod_base = OTHER; note = 2'-O-methylguanosine-3'-phosphate
  modified_base 9: mod_base = OTHER; note = 2'-O-methyladenosine-3'-phosphate
  modified_base 10: mod_base = OTHER; note = 2'-O-methyladenosine-3'-phosphate
  modified_base 11: mod_base = OTHER; note = 2'-O-methylcytidine-3'-phosphate
  modified_base 12: mod_base = OTHER; note = 2'-O-methyladenosine-3'-phosphate
  modified_base 13: mod_base = OTHER; note = 2'-O-methylguanosine-3'-phosphate
  modified_base 14: mod_base = OTHER; note = 2'-deoxy-2'-fluorouridine-3'-phosphate
  modified_base 15: mod_base = OTHER; note = 2'-O-methylcytidine-3'-phosphate
  modified_base 16: mod_base = OTHER; note = 2'-deoxy-2'-fluorocytidine-3'-phosphate
  modified_base 17: mod_base = OTHER; note = 2'-O-methyluridine-3'-phosphate
  modified_base 18: mod_base = OTHER; note = 2'-O-methyluridine-3'-phosphate
  modified_base 19: mod_base = OTHER; note = 2'-O-methyladenosine-3'-phosphate
  modified_base 20: mod_base = OTHER; note = 2'-O-methylcytidine-3'-phosphate
  modified_base 21: mod_base = OTHER; note = 2'-O-methyladenosine-3'-phosphorothioate
  modified_base 22: mod_base = OTHER; note = 2'-O-methylguanosine-3'-phosphorothioate
  modified_base 23: mod_base = OTHER; note = 2'-O-methyladenosine
tgagaaagaacagtccttacaga

SEQ ID NO: 13144 - RNA, 23 nt, synthetic construct
  source 1..23: mol_type = other RNA
  modified_base 1: mod_base = OTHER; note = 2'-O-methyluridine-3'-phosphorothioate 5'-(E)-Vinylphosphonate
  modified_base 2: mod_base = OTHER; note = 2'-deoxy-2'-fluoroadenosine-3'-phosphorothioate
  modified_base 3: mod_base = OTHER; note = 2'-O-methyladenosine-3'-phosphate
  modified_base 4: mod_base = OTHER; note = 2'-O-methyladenosine-3'-phosphate
  modified_base 5: mod_base = OTHER; note = 2'-O-methyladenosine-3'-phosphate
  modified_base 6: mod_base = OTHER; note = 2'-deoxy-2'-fluoroguanosine-3'-phosphate
  modified_base 7: mod_base = OTHER; note = 2'-O-methyluridine-3'-phosphate
  modified_base 8: mod_base = OTHER; note = 2'-O-methyluridine-3'-phosphate
  modified_base 9: mod_base = OTHER; note = 2'-O-methyladenosine-3'-phosphate
  modified_base 10: mod_base = OTHER; note = 2'-O-methylguanosine-3'-phosphate
  modified_base 11: mod_base = OTHER; note = 2'-O-methyladenosine-3'-phosphate
  modified_base 12: mod_base = OTHER; note = 2'-O-methyluridine-3'-phosphate
  modified_base 13: mod_base = OTHER; note = 2'-O-methyladenosine-3'-phosphate
  modified_base 14: mod_base = OTHER; note = 2'-deoxy-2'-fluoroadenosine-3'-phosphate
  modified_base 15: mod_base = OTHER; note = 2'-O-methyluridine-3'-phosphate
  modified_base 16: mod_base = OTHER; note = 2'-deoxy-2'-fluoroadenosine-3'-phosphate
  modified_base 17: mod_base = OTHER; note = 2'-O-methyluridine-3'-phosphate
  modified_base 18: mod_base = OTHER; note = 2'-O-methylcytidine-3'-phosphate
  modified_base 19: mod_base = OTHER; note = 2'-O-methylcytidine-3'-phosphate
  modified_base 20: mod_base = OTHER; note = 2'-O-methylcytidine-3'-phosphate
  modified_base 21: mod_base = OTHER; note = 2'-O-methyladenosine-3'-phosphorothioate
  modified_base 22: mod_base = OTHER; note = 2'-O-methylcytidine-3'-phosphorothioate
  modified_base 23: mod_base = OTHER; note = 2'-O-methyluridine
taaaagttagataatatcccact

SEQ ID NO: 13145 - RNA, 23 nt, synthetic construct
  source 1..23: mol_type = other RNA
  modified_base 1: mod_base = OTHER; note = 2'-O-methyluridine-3'-phosphorothioate 5'-(E)-Vinylphosphonate
  modified_base 2: mod_base = OTHER; note = 2'-deoxy-2'-fluoroguanosine-3'-phosphorothioate
  modified_base 3: mod_base = OTHER; note = 2'-O-methyladenosine-3'-phosphate
  modified_base 4: mod_base = OTHER; note = 2'-O-methyladenosine-3'-phosphate
  modified_base 5: mod_base = OTHER; note = 2'-O-methylguanosine-3'-phosphate
  modified_base 6: mod_base = OTHER; note = 2'-deoxy-2'-fluoroadenosine-3'-phosphate
  modified_base 7: mod_base = OTHER; note = 2'-O-methyluridine-3'-phosphate
  modified_base 8: mod_base = OTHER; note = 2'-O-methylguanosine-3'-phosphate
  modified_base 9: mod_base = OTHER; note = 2'-O-methyladenosine-3'-phosphate
  modified_base 10: mod_base = OTHER; note = 2'-O-methyladenosine-3'-phosphate
  modified_base 11: mod_base = OTHER; note = 2'-O-methyluridine-3'-phosphate
  modified_base 12: mod_base = OTHER; note = 2'-O-methylguanosine-3'-phosphate
  modified_base 13: mod_base = OTHER; note = 2'-O-methylcytidine-3'-phosphate
  modified_base 14: mod_base = OTHER; note = 2'-deoxy-2'-fluorocytidine-3'-phosphate
  modified_base 15: mod_base = OTHER; note = 2'-O-methyladenosine-3'-phosphate
  modified_base 16: mod_base = OTHER; note = 2'-deoxy-2'-fluoroadenosine-3'-phosphate
  modified_base 17: mod_base = OTHER; note = 2'-O-methyladenosine-3'-phosphate
  modified_base 18: mod_base = OTHER; note = 2'-O-methylguanosine-3'-phosphate
  modified_base 19: mod_base = OTHER; note = 2'-O-methyladenosine-3'-phosphate
  modified_base 20: mod_base = OTHER; note = 2'-O-methylcytidine-3'-phosphate
  modified_base 21: mod_base = OTHER; note = 2'-O-methyladenosine-3'-phosphorothioate
  modified_base 22: mod_base = OTHER; note = 2'-O-methyladenosine-3'-phosphorothioate
  modified_base 23: mod_base = OTHER; note = 2'-O-methyladenosine
tgaagatgaatgccaaagacaaa

SEQ ID NO: 13146 - RNA, 23 nt, synthetic construct
  source 1..23: mol_type = other RNA
  modified_base 1: mod_base = OTHER; note = 2'-O-methyluridine-3'-phosphorothioate 5'-(E)-Vinylphosphonate
  modified_base 2: mod_base = OTHER; note = 2'-deoxy-2'-fluoroadenosine-3'-phosphorothioate
  modified_base 3: mod_base = OTHER; note = 2'-O-methyladenosine-3'-phosphate
  modified_base 4: mod_base = OTHER; note = 2'-O-methyladenosine-3'-phosphate
  modified_base 5: mod_base = OTHER; note = 2'-O-methyladenosine-3'-phosphate
  modified_base 6: mod_base = OTHER; note = 2'-deoxy-2'-fluoroguanosine-3'-phosphate
  modified_base 7: mod_base = OTHER; note = 2'-O-methyladenosine-3'-phosphate
  modified_base 8: mod_base = OTHER; note = 2'-O-methyladenosine-3'-phosphate
  modified_base 9: mod_base = OTHER; note = 2'-O-methylguanosine-3'-phosphate
  modified_base 10: mod_base = OTHER; note = 2'-O-methyladenosine-3'-phosphate
  modified_base 11: mod_base = OTHER; note = 2'-O-methyluridine-3'-phosphate
  modified_base 12: mod_base = OTHER; note = 2'-O-methylguanosine-3'-phosphate
  modified_base 13: mod_base = OTHER; note = 2'-O-methyladenosine-3'-phosphate
  modified_base 14: mod_base = OTHER; note = 2'-deoxy-2'-fluoroadenosine-3'-phosphate
  modified_base 15: mod_base = OTHER; note = 2'-O-methyluridine-3'-phosphate
  modified_base 16: mod_base = OTHER; note = 2'-deoxy-2'-fluoroguanosine-3'-phosphate
  modified_base 17: mod_base = OTHER; note = 2'-O-methylcytidine-3'-phosphate
  modified_base 18: mod_base = OTHER; note = 2'-O-methylcytidine-3'-phosphate
  modified_base 19: mod_base = OTHER; note = 2'-O-methyladenosine-3'-phosphate
  modified_base 20: mod_base = OTHER; note = 2'-O-methyladenosine-3'-phosphate
  modified_base 21: mod_base = OTHER; note = 2'-O-methyladenosine-3'-phosphorothioate
  modified_base 22: mod_base = OTHER; note = 2'-O-methylguanosine-3'-phosphorothioate
  modified_base 23: mod_base = OTHER; note = 2'-O-methyladenosine
taaaagaagatgaatgccaaaga

SEQ ID NO: 13147 - RNA, 23 nt, synthetic construct
  source 1..23: mol_type = other RNA
  modified_base 1: mod_base = OTHER; note = 2'-O-methyluridine-3'-phosphorothioate 5'-(E)-Vinylphosphonate
  modified_base 2: mod_base = OTHER; note = 2'-deoxy-2'-fluorouridine-3'-phosphorothioate
  modified_base 3: mod_base = OTHER; note = 2'-O-methylguanosine-3'-phosphate
  modified_base 4: mod_base = OTHER; note = 2'-O-methylcytidine-3'-phosphate
  modified_base 5: mod_base = OTHER; note = 2'-O-methylcytidine-3'-phosphate
  modified_base 6: mod_base = OTHER; note = 2'-deoxy-2'-fluoroadenosine-3'-phosphate
  modified_base 7: mod_base = OTHER; note = 2'-O-methyladenosine-3'-phosphate
  modified_base 8: mod_base = OTHER; note = 2'-O-methyladenosine-3'-phosphate
  modified_base 9: mod_base = OTHER; note = 2'-O-methylcytidine-3'-phosphate
  modified_base 10: mod_base = OTHER; note = 2'-O-methyladenosine-3'-phosphate
  modified_base 11: mod_base = OTHER; note = 2'-O-methyluridine-3'-phosphate
  modified_base 12: mod_base = OTHER; note = 2'-O-methyluridine-3'-phosphate
  modified_base 13: mod_base = OTHER; note = 2'-O-methyluridine-3'-phosphate
  modified_base 14: mod_base = OTHER; note = 2'-deoxy-2'-fluorouridine-3'-phosphate
  modified_base 15: mod_base = OTHER; note = 2'-O-methyluridine-3'-phosphate
  modified_base 16: mod_base = OTHER; note = 2'-deoxy-2'-fluorouridine-3'-phosphate
  modified_base 17: mod_base = OTHER; note = 2'-O-methyladenosine-3'-phosphate
  modified_base 18: mod_base = OTHER; note = 2'-O-methyladenosine-3'-phosphate
  modified_base 19: mod_base = OTHER; note = 2'-O-methyluridine-3'-phosphate
  modified_base 20: mod_base = OTHER; note = 2'-O-methylguanosine-3'-phosphate
  modified_base 21: mod_base = OTHER; note = 2'-O-methylcytidine-3'-phosphorothioate
  modified_base 22: mod_base = OTHER; note = 2'-O-methyladenosine-3'-phosphorothioate
  modified_base 23: mod_base = OTHER; note = 2'-O-methylcytidine
ttgccaaacattttttaatgcac

SEQ ID NO: 13148 - RNA, 23 nt, synthetic construct
  source 1..23: mol_type = other RNA
  modified_base 1: mod_base = OTHER; note = 2'-O-methyluridine-3'-phosphorothioate 5'-(E)-Vinylphosphonate
  modified_base 2: mod_base = OTHER; note = 2'-deoxy-2'-fluoroadenosine-3'-phosphorothioate
  modified_base 3: mod_base = OTHER; note = 2'-O-methyluridine-3'-phosphate
  modified_base 4: mod_base = OTHER; note = 2'-O-methyladenosine-3'-phosphate
  modified_base 5: mod_base = OTHER; note = 2'-O-methylcytidine-3'-phosphate
  modified_base 6: mod_base = OTHER; note = 2'-deoxy-2'-fluoroadenosine-3'-phosphate
  modified_base 7: mod_base = OTHER; note = 2'-O-methylguanosine-3'-phosphate
  modified_base 8: mod_base = OTHER; note = 2'-O-methylguanosine-3'-phosphate
  modified_base 9: mod_base = OTHER; note = 2'-O-methyladenosine-3'-phosphate
  modified_base 10: mod_base = OTHER; note = 2'-O-methyladenosine-3'-phosphate
  modified_base 11: mod_base = OTHER; note = 2'-O-methyluridine-3'-phosphate
  modified_base 12: mod_base = OTHER; note = 2'-O-methyluridine-3'-phosphate
  modified_base 13: mod_base = OTHER; note = 2'-O-methyladenosine-3'-phosphate
  modified_base 14: mod_base = OTHER; note = 2'-deoxy-2'-fluorouridine-3'-phosphate
  modified_base 15: mod_base = OTHER; note = 2'-O-methyladenosine-3'-phosphate
  modified_base 16: mod_base = OTHER; note = 2'-deoxy-2'-fluoroguanosine-3'-phosphate
  modified_base 17: mod_base = OTHER; note = 2'-O-methyladenosine-3'-phosphate
  modified_base 18: mod_base = OTHER; note = 2'-O-methylguanosine-3'-phosphate
  modified_base 19: mod_base = OTHER; note = 2'-O-methyluridine-3'-phosphate
  modified_base 20: mod_base = OTHER; note = 2'-O-methylguanosine-3'-phosphate
  modified_base 21: mod_base = OTHER; note = 2'-O-methyladenosine-3'-phosphorothioate
  modified_base 22: mod_base = OTHER; note = 2'-O-methylcytidine-3'-phosphorothioate
  modified_base 23: mod_base = OTHER; note = 2'-O-methyluridine
tatacaggaattatagagtgact

SEQ ID NO: 13149 - RNA, 23 nt, synthetic construct
  source 1..23: mol_type = other RNA
  modified_base 1: mod_base = OTHER; note = 2'-O-methyluridine-3'-phosphorothioate 5'-(E)-Vinylphosphonate
  modified_base 2: mod_base = OTHER; note = 2'-deoxy-2'-fluoroguanosine-3'-phosphorothioate
  modified_base 3: mod_base = OTHER; note = 2'-O-methyladenosine-3'-phosphate
  modified_base 4: mod_base = OTHER; note = 2'-O-methylcytidine-3'-phosphate
  modified_base 5: mod_base = OTHER; note = 2'-O-methyladenosine-3'-phosphate
  modified_base 6: mod_base = OTHER; note = 2'-deoxy-2'-fluoroguanosine-3'-phosphate
  modified_base 7: mod_base = OTHER; note = 2'-O-methylguanosine-3'-phosphate
  modified_base 8: mod_base = OTHER; note = 2'-O-methyluridine-3'-phosphate
  modified_base 9: mod_base = OTHER; note = 2'-O-methyluridine-3'-phosphate
  modified_base 10: mod_base = OTHER; note = 2'-O-methyladenosine-3'-phosphate
  modified_base 11: mod_base = OTHER; note = 2'-O-methyladenosine-3'-phosphate
  modified_base 12: mod_base = OTHER; note = 2'-O-methyladenosine-3'-phosphate
  modified_base 13: mod_base = OTHER; note = 2'-O-methylcytidine-3'-phosphate
  modified_base 14: mod_base = OTHER; note = 2'-deoxy-2'-fluoroguanosine-3'-phosphate
  modified_base 15: mod_base = OTHER; note = 2'-O-methyladenosine-3'-phosphate
  modified_base 16: mod_base = OTHER; note = 2'-deoxy-2'-fluorocytidine-3'-phosphate
  modified_base 17: mod_base = OTHER; note = 2'-O-methyladenosine-3'-phosphate
  modified_base 18: mod_base = OTHER; note = 2'-O-methyladenosine-3'-phosphate
  modified_base 19: mod_base = OTHER; note = 2'-O-methylcytidine-3'-phosphate
  modified_base 20: mod_base = OTHER; note = 2'-O-methyluridine-3'-phosphate
  modified_base 21: mod_base = OTHER; note = 2'-O-methyladenosine-3'-phosphorothioate
  modified_base 22: mod_base = OTHER; note = 2'-O-methyladenosine-3'-phosphorothioate
  modified_base 23: mod_base = OTHER; note = 2'-O-methyladenosine
tgacaggttaaacgacaactaaa

SEQ ID NO: 13150 - RNA, 23 nt, synthetic construct
  source 1..23: mol_type = other RNA
  modified_base 1: mod_base = OTHER; note = 2'-O-methyluridine-3'-phosphorothioate 5'-(E)-Vinylphosphonate
  modified_base 2: mod_base = OTHER; note = 2'-deoxy-2'-fluoroguanosine-3'-phosphorothioate
  modified_base 3: mod_base = OTHER; note = 2'-O-methylguanosine-3'-phosphate
  modified_base 4: mod_base = OTHER; note = 2'-O-methyladenosine-3'-phosphate
  modified_base 5: mod_base = OTHER; note = 2'-O-methylcytidine-3'-phosphate
  modified_base 6: mod_base = OTHER; note = 2'-deoxy-2'-fluoroadenosine-3'-phosphate
  modified_base 7: mod_base = OTHER; note = 2'-O-methylguanosine-3'-phosphate
  modified_base 8: mod_base = OTHER; note = 2'-O-methylguanosine-3'-phosphate
  modified_base 9: mod_base = OTHER; note = 2'-O-methyluridine-3'-phosphate
  modified_base 10: mod_base = OTHER; note = 2'-O-methyluridine-3'-phosphate
  modified_base 11: mod_base = OTHER; note = 2'-O-methyladenosine-3'-phosphate
  modified_base 12: mod_base = OTHER; note = 2'-O-methyladenosine-3'-phosphate
  modified_base 13: mod_base = OTHER; note = 2'-O-methyladenosine-3'-phosphate
  modified_base 14: mod_base = OTHER; note = 2'-deoxy-2'-fluorocytidine-3'-phosphate
  modified_base 15: mod_base = OTHER; note = 2'-O-methylguanosine-3'-phosphate
  modified_base 16: mod_base = OTHER; note = 2'-deoxy-2'-fluoroadenosine-3'-phosphate
  modified_base 17: mod_base = OTHER; note = 2'-O-methylcytidine-3'-phosphate
  modified_base 18: mod_base = OTHER; note = 2'-O-methyladenosine-3'-phosphate
  modified_base 19: mod_base = OTHER; note = 2'-O-methyladenosine-3'-phosphate
  modified_base 20: mod_base = OTHER; note = 2'-O-methylcytidine-3'-phosphate
  modified_base 21: mod_base = OTHER; note = 2'-O-methyluridine-3'-phosphorothioate
  modified_base 22: mod_base = OTHER; note = 2'-O-methyladenosine-3'-phosphorothioate
  modified_base 23: mod_base = OTHER; note = 2'-O-methyladenosine
tggacaggttaaacgacaactaa

SEQ ID NO: 13151 - RNA, 23 nt, synthetic construct
  source 1..23: mol_type = other RNA
  modified_base 1: mod_base = OTHER; note = 2'-O-methyluridine-3'-phosphorothioate 5'-(E)-Vinylphosphonate
  modified_base 2: mod_base = OTHER; note = 2'-deoxy-2'-fluorouridine-3'-phosphorothioate
  modified_base 3: mod_base = OTHER; note = 2'-O-methylguanosine-3'-phosphate
  modified_base 4: mod_base = OTHER; note = 2'-O-methylguanosine-3'-phosphate
  modified_base 5: mod_base = OTHER; note = 2'-O-methyladenosine-3'-phosphate
  modified_base 6: mod_base = OTHER; note = 2'-deoxy-2'-fluorocytidine-3'-phosphate
  modified_base 7: mod_base = OTHER; note = 2'-O-methyladenosine-3'-phosphate
  modified_base 8: mod_base = OTHER; note = 2'-O-methylguanosine-3'-phosphate
  modified_base 9: mod_base = OTHER; note = 2'-O-methylguanosine-3'-phosphate
  modified_base 10: mod_base = OTHER; note = 2'-O-methyluridine-3'-phosphate
  modified_base 11: mod_base = OTHER; note = 2'-O-methyluridine-3'-phosphate
  modified_base 12: mod_base = OTHER; note = 2'-O-methyladenosine-3'-phosphate
  modified_base 13: mod_base = OTHER; note = 2'-O-methyladenosine-3'-phosphate
  modified_base 14: mod_base = OTHER; note = 2'-deoxy-2'-fluoroadenosine-3'-phosphate
  modified_base 15: mod_base = OTHER; note = 2'-O-methylcytidine-3'-phosphate
  modified_base 16: mod_base = OTHER; note = 2'-deoxy-2'-fluoroguanosine-3'-phosphate
  modified_base 17: mod_base = OTHER; note = 2'-O-methyladenosine-3'-phosphate
  modified_base 18: mod_base = OTHER; note = 2'-O-methylcytidine-3'-phosphate
  modified_base 19: mod_base = OTHER; note = 2'-O-methyladenosine-3'-phosphate
  modified_base 20: mod_base = OTHER; note = 2'-O-methyladenosine-3'-phosphate
  modified_base 21: mod_base = OTHER; note = 2'-O-methylcytidine-3'-phosphorothioate
  modified_base 22: mod_base = OTHER; note = 2'-O-methyluridine-3'-phosphorothioate
  modified_base 23: mod_base = OTHER; note = 2'-O-methyladenosine
ttggacaggttaaacgacaacta

SEQ ID NO: 13152 - RNA, 23 nt, synthetic construct
  source 1..23: mol_type = other RNA
  modified_base 1: mod_base = OTHER; note = 2'-O-methyluridine-3'-phosphorothioate 5'-(E)-Vinylphosphonate
  modified_base 2: mod_base = OTHER; note = 2'-deoxy-2'-fluoroguanosine-3'-phosphorothioate
  modified_base 3: mod_base = OTHER; note = 2'-O-methyladenosine-3'-phosphate
  modified_base 4: mod_base = OTHER; note = 2'-O-methyladenosine-3'-phosphate
  modified_base 5: mod_base = OTHER; note = 2'-O-methylguanosine-3'-phosphate
  modified_base 6: mod_base = OTHER; note = 2'-deoxy-2'-fluorouridine-3'-phosphate
  modified_base 7: mod_base = OTHER; note = 2'-O-methyluridine-3'-phosphate
  modified_base 8: mod_base = OTHER; note = 2'-O-methyluridine-3'-phosphate
  modified_base 9: mod_base = OTHER; note = 2'-O-methylguanosine-3'-phosphate
  modified_base 10: mod_base = OTHER; note = 2'-O-methylguanosine-3'-phosphate
  modified_base 11: mod_base = OTHER; note = 2'-O-methyladenosine-3'-phosphate
  modified_base 12: mod_base = OTHER; note = 2'-O-methylcytidine-3'-phosphate
  modified_base 13: mod_base = OTHER; note = 2'-O-methyladenosine-3'-phosphate
  modified_base 14: mod_base = OTHER; note = 2'-deoxy-2'-fluoroguanosine-3'-phosphate
  modified_base 15: mod_base = OTHER; note = 2'-O-methylguanosine-3'-phosphate
  modified_base 16: mod_base = OTHER; note = 2'-deoxy-2'-fluorouridine-3'-phosphate
  modified_base 17: mod_base = OTHER; note = 2'-O-methyluridine-3'-phosphate
  modified_base 18: mod_base = OTHER; note = 2'-O-methyladenosine-3'-phosphate
  modified_base 19: mod_base = OTHER; note = 2'-O-methyladenosine-3'-phosphate
  modified_base 20: mod_base = OTHER; note = 2'-O-methyladenosine-3'-phosphate
  modified_base 21: mod_base = OTHER; note = 2'-O-methylcytidine-3'-phosphorothioate
  modified_base 22: mod_base = OTHER; note = 2'-O-methylguanosine-3'-phosphorothioate
  modified_base 23: mod_base = OTHER; note = 2'-O-methyladenosine
tgaagtttggacaggttaaacga

SEQ ID NO: 13153 - RNA, 23 nt, synthetic construct
  source 1..23: mol_type = other RNA
  modified_base 1: mod_base = OTHER; note = 2'-O-methyluridine-3'-phosphorothioate 5'-(E)-Vinylphosphonate
  modified_base 2: mod_base = OTHER; note = 2'-deoxy-2'-fluorouridine-3'-phosphorothioate
  modified_base 3: mod_base = OTHER; note = 2'-O-methyluridine-3'-phosphate
  modified_base 4: mod_base = OTHER; note = 2'-O-methyladenosine-3'-phosphate
  modified_base 5: mod_base = OTHER; note = 2'-O-methyladenosine-3'-phosphate
  modified_base 6: mod_base = OTHER; note = 2'-deoxy-2'-fluoroguanosine-3'-phosphate
  modified_base 7: mod_base = OTHER; note = 2'-O-methyladenosine-3'-phosphate
  modified_base 8: mod_base = OTHER; note = 2'-O-methyladenosine-3'-phosphate
  modified_base 9: mod_base = OTHER; note = 2'-O-methylguanosine-3'-phosphate
  modified_base 10: mod_base = OTHER; note = 2'-O-methyluridine-3'-phosphate
  modified_base 11: mod_base = OTHER; note = 2'-O-methyluridine-3'-phosphate
  modified_base 12: mod_base = OTHER; note = 2'-O-methylcytidine-3'-phosphate
  modified_base 13: mod_base = OTHER; note = 2'-O-methyladenosine-3'-phosphate
  modified_base 14: mod_base = OTHER; note = 2'-deoxy-2'-fluorouridine-3'-phosphate
  modified_base 15: mod_base = OTHER; note = 2'-O-methyluridine-3'-phosphate
  modified_base 16: mod_base = OTHER; note = 2'-deoxy-2'-fluoroguanosine-3'-phosphate
  modified_base 17: mod_base = OTHER; note = 2'-O-methyluridine-3'-phosphate
  modified_base 18: mod_base = OTHER; note = 2'-O-methylguanosine-3'-phosphate
  modified_base 19: mod_base = OTHER; note = 2'-O-methyluridine-3'-phosphate
  modified_base 20: mod_base = OTHER; note = 2'-O-methyladenosine-3'-phosphate
  modified_base 21: mod_base = OTHER; note = 2'-O-methylguanosine-3'-phosphorothioate
  modified_base 22: mod_base = OTHER; note = 2'-O-methyladenosine-3'-phosphorothioate
  modified_base 23: mod_base = OTHER; note = 2'-O-methyladenosine
tttaagaagttcattgtgtagaa

SEQ ID NO: 13154 - RNA, 23 nt, synthetic construct
  source 1..23: mol_type = other RNA
  modified_base 1: mod_base = OTHER; note = 2'-O-methyluridine-3'-phosphorothioate 5'-(E)-Vinylphosphonate
  modified_base 2: mod_base = OTHER; note = 2'-deoxy-2'-fluorouridine-3'-phosphorothioate
  modified_base 3: mod_base = OTHER; note = 2'-O-methyluridine-3'-phosphate
  modified_base 4: mod_base = OTHER; note = 2'-O-methylguanosine-3'-phosphate
  modified_base 5: mod_base = OTHER; note = 2'-O-methylguanosine-3'-phosphate
  modified_base 6: mod_base = OTHER; note = 2'-deoxy-2'-fluoroadenosine-3'-phosphate
  modified_base 7: mod_base = OTHER; note = 2'-O-methylcytidine-3'-phosphate
  modified_base 8: mod_base = OTHER; note = 2'-O-methyladenosine-3'-phosphate
  modified_base 9: mod_base = OTHER; note = 2'-O-methylguanosine-3'-phosphate
  modified_base 10: mod_base = OTHER; note = 2'-O-methylguanosine-3'-phosphate
  modified_base 11: mod_base = OTHER; note = 2'-O-methyluridine-3'-phosphate
  modified_base 12: mod_base = OTHER; note = 2'-O-methyluridine-3'-phosphate
  modified_base 13: mod_base = OTHER; note = 2'-O-methyladenosine-3'-phosphate
  modified_base 14: mod_base = OTHER; note = 2'-deoxy-2'-fluoroadenosine-3'-phosphate
  modified_base 15: mod_base = OTHER; note = 2'-O-methyladenosine-3'-phosphate
  modified_base 16: mod_base = OTHER; note = 2'-deoxy-2'-fluorocytidine-3'-phosphate
  modified_base 17: mod_base = OTHER; note = 2'-O-methylguanosine-3'-phosphate
  modified_base 18: mod_base = OTHER; note = 2'-O-methyladenosine-3'-phosphate
  modified_base 19: mod_base = OTHER; note = 2'-O-methylcytidine-3'-phosphate
  modified_base 20: mod_base = OTHER; note = 2'-O-methyladenosine-3'-phosphate
  modified_base 21: mod_base = OTHER; note = 2'-O-methyladenosine-3'-phosphorothioate
  modified_base 22: mod_base = OTHER; note = 2'-O-methylcytidine-3'-phosphorothioate
  modified_base 23: mod_base = OTHER; note = 2'-O-methyluridine
tttggacaggttaaacgacaact

SEQ ID NO: 13155 - RNA, 23 nt, synthetic construct
  source 1..23: mol_type = other RNA
  modified_base 1: mod_base = OTHER; note = 2'-O-methyluridine-3'-phosphorothioate 5'-(E)-Vinylphosphonate
  modified_base 2: mod_base = OTHER; note = 2'-deoxy-2'-fluorouridine-3'-phosphorothioate
  modified_base 3: mod_base = OTHER; note = 2'-O-methyluridine-3'-phosphate
  modified_base 4: mod_base = OTHER; note = 2'-O-methyluridine-3'-phosphate
  modified_base 5: mod_base = OTHER; note = 2'-O-methylguanosine-3'-phosphate
  modified_base 6: mod_base = OTHER; note = 2'-deoxy-2'-fluoroguanosine-3'-phosphate
  modified_base 7: mod_base = OTHER; note = 2'-O-methyladenosine-3'-phosphate
  modified_base 8: mod_base = OTHER; note = 2'-O-methylcytidine-3'-phosphate
  modified_base 9: mod_base = OTHER; note = 2'-O-methyladenosine-3'-phosphate
  modified_base 10: mod_base = OTHER; note = 2'-O-methylguanosine-3'-phosphate
  modified_base 11: mod_base = OTHER; note = 2'-O-methylguanosine-3'-phosphate
  modified_base 12: mod_base = OTHER; note = 2'-O-methyluridine-3'-phosphate
  modified_base 13: mod_base = OTHER; note = 2'-O-methyluridine-3'-phosphate
  modified_base 14: mod_base = OTHER; note = 2'-deoxy-2'-fluoroadenosine-3'-phosphate
  modified_base 15: mod_base = OTHER; note = 2'-O-methyladenosine-3'-phosphate
  modified_base 16: mod_base = OTHER; note = 2'-deoxy-2'-fluoroadenosine-3'-phosphate
  modified_base 17: mod_base = OTHER; note = 2'-O-methylcytidine-3'-phosphate
  modified_base 18: mod_base = OTHER; note = 2'-O-methylguanosine-3'-phosphate
  modified_base 19: mod_base = OTHER; note = 2'-O-methyladenosine-3'-phosphate
  modified_base 20: mod_base = OTHER; note = 2'-O-methylcytidine-3'-phosphate
  modified_base 21: mod_base = OTHER; note = 2'-O-methyladenosine-3'-phosphorothioate
  modified_base 22: mod_base = OTHER; note = 2'-O-methyladenosine-3'-phosphorothioate
  modified_base 23: mod_base = OTHER; note = 2'-O-methylcytidine
ttttggacaggttaaacgacaac

SEQ ID NO: 13156 - RNA, 23 nt, synthetic construct
  source 1..23: mol_type = other RNA
  modified_base 1: mod_base = OTHER; note = 2'-O-methyluridine-3'-phosphorothioate 5'-(E)-Vinylphosphonate
  modified_base 2: mod_base = OTHER; note = 2'-deoxy-2'-fluoroguanosine-3'-phosphorothioate
  modified_base 3: mod_base = OTHER; note = 2'-O-methyluridine-3'-phosphate
  modified_base 4: mod_base = OTHER; note = 2'-O-methyluridine-3'-phosphate
  modified_base 5: mod_base = OTHER; note = 2'-O-methyluridine-3'-phosphate
  modified_base 6: mod_base = OTHER; note = 2'-deoxy-2'-fluoroguanosine-3'-phosphate
  modified_base 7: mod_base = OTHER; note = 2'-O-methylguanosine-3'-phosphate
  modified_base 8: mod_base = OTHER; note = 2'-O-methyladenosine-3'-phosphate
  modified_base 9: mod_base = OTHER; note = 2'-O-methylcytidine-3'-phosphate
  modified_base 10: mod_base = OTHER; note = 2'-O-methyladenosine-3'-phosphate
  modified_base 11: mod_base = OTHER; note = 2'-O-methylguanosine-3'-phosphate
  modified_base 12: mod_base = OTHER; note = 2'-O-methylguanosine-3'-phosphate
  modified_base 13: mod_base = OTHER; note = 2'-O-methyluridine-3'-phosphate
  modified_base 14: mod_base = OTHER; note = 2'-deoxy-2'-fluorouridine-3'-phosphate
  modified_base 15: mod_base = OTHER; note = 2'-O-methyladenosine-3'-phosphate
  modified_base 16: mod_base = OTHER; note = 2'-deoxy-2'-fluoroadenosine-3'-phosphate
  modified_base 17: mod_base = OTHER; note = 2'-O-methyladenosine-3'-phosphate
  modified_base 18: mod_base = OTHER; note = 2'-O-methylcytidine-3'-phosphate
  modified_base 19: mod_base = OTHER; note = 2'-O-methylguanosine-3'-phosphate
  modified_base 20: mod_base = OTHER; note = 2'-O-methyladenosine-3'-phosphate
  modified_base 21: mod_base = OTHER; note = 2'-O-methylcytidine-3'-phosphorothioate
  modified_base 22: mod_base = OTHER; note = 2'-O-methyladenosine-3'-phosphorothioate
  modified_base 23: mod_base = OTHER; note = 2'-O-methyladenosine
tgtttggacaggttaaacgacaa

SEQ ID NO: 13157 - RNA, 23 nt, synthetic construct
  source 1..23: mol_type = other RNA
  modified_base 1: mod_base = OTHER; note = 2'-O-methyluridine-3'-phosphorothioate 5'-(E)-Vinylphosphonate
  modified_base 2: mod_base = OTHER; note = 2'-deoxy-2'-fluoroadenosine-3'-phosphorothioate
  modified_base 3: mod_base = OTHER; note = 2'-O-methylguanosine-3'-phosphate
  modified_base 4: mod_base = OTHER; note = 2'-O-methyluridine-3'-phosphate
  modified_base 5: mod_base = OTHER; note = 2'-O-methyluridine-3'-phosphate
  modified_base 6: mod_base = OTHER; note = 2'-deoxy-2'-fluorouridine-3'-phosphate
  modified_base 7: mod_base = OTHER; note = 2'-O-methylguanosine-3'-phosphate
  modified_base 8: mod_base = OTHER; note = 2'-O-methylguanosine-3'-phosphate
  modified_base 9: mod_base = OTHER; note = 2'-O-methyladenosine-3'-phosphate
  modified_base 10: mod_base = OTHER; note = 2'-O-methylcytidine-3'-phosphate
  modified_base 11: mod_base = OTHER; note = 2'-O-methyladenosine-3'-phosphate
  modified_base 12: mod_base = OTHER; note = 2'-O-methylguanosine-3'-phosphate
  modified_base 13: mod_base = OTHER; note = 2'-O-methylguanosine-3'-phosphate
  modified_base 14: mod_base = OTHER; note = 2'-deoxy-2'-fluorouridine-3'-phosphate
  modified_base 15: mod_base = OTHER; note = 2'-O-methyluridine-3'-phosphate
  modified_base 16: mod_base = OTHER; note = 2'-deoxy-2'-fluoroadenosine-3'-phosphate
  modified_base 17: mod_base = OTHER; note = 2'-O-methyladenosine-3'-phosphate
  modified_base 18: mod_base = OTHER; note = 2'-O-methyladenosine-3'-phosphate
  modified_base 19: mod_base = OTHER; note = 2'-O-methylcytidine-3'-phosphate
  modified_base 20: mod_base = OTHER; note = 2'-O-methylguanosine-3'-phosphate
  modified_base 21: mod_base = OTHER; note = 2'-O-methyladenosine-3'-phosphorothioate
  modified_base 22: mod_base = OTHER; note = 2'-O-methylcytidine-3'-phosphorothioate
  modified_base 23: mod_base = OTHER; note = 2'-O-methyladenosine
tagtttggacaggttaaacgaca

SEQ ID NO: 13158 - RNA, 23 nt, synthetic construct
  source 1..23: mol_type = other RNA
  modified_base 1: mod_base = OTHER; note = 2'-O-methyluridine-3'-phosphorothioate 5'-(E)-Vinylphosphonate
  modified_base 2: mod_base = OTHER; note = 2'-deoxy-2'-fluoroadenosine-3'-phosphorothioate
  modified_base 3: mod_base = OTHER; note = 2'-O-methyladenosine-3'-phosphate
  modified_base 4: mod_base = OTHER; note = 2'-O-methylguanosine-3'-phosphate
  modified_base 5: mod_base = OTHER; note = 2'-O-methyluridine-3'-phosphate
  modified_base 6: mod_base = OTHER; note = 2'-deoxy-2'-fluorouridine-3'-phosphate
  modified_base 7: mod_base = OTHER; note = 2'-O-methyluridine-3'-phosphate
  modified_base 8: mod_base = OTHER; note = 2'-O-methylguanosine-3'-phosphate
  modified_base 9: mod_base = OTHER; note = 2'-O-methylguanosine-3'-phosphate
  modified_base 10: mod_base = OTHER; note = 2'-O-methyladenosine-3'-phosphate
  modified_base 11: mod_base = OTHER; note = 2'-O-methylcytidine-3'-phosphate
  modified_base 12: mod_base = OTHER; note = 2'-O-methyladenosine-3'-phosphate
  modified_base 13: mod_base = OTHER; note = 2'-O-methylguanosine-3'-phosphate
  modified_base 14: mod_base = OTHER; note = 2'-deoxy-2'-fluoroguanosine-3'-phosphate
  modified_base 15: mod_base = OTHER; note = 2'-O-methyluridine-3'-phosphate
  modified_base 16: mod_base = OTHER; note = 2'-deoxy-2'-fluorouridine-3'-phosphate
  modified_base 17: mod_base = OTHER; note = 2'-O-methyladenosine-3'-phosphate
  modified_base 18: mod_base = OTHER; note = 2'-O-methyladenosine-3'-phosphate
  modified_base 19: mod_base = OTHER; note = 2'-O-methyladenosine-3'-phosphate
  modified_base 20: mod_base = OTHER; note = 2'-O-methylcytidine-3'-phosphate
  modified_base 21: mod_base = OTHER; note = 2'-O-methylguanosine-3'-phosphorothioate
  modified_base 22: mod_base = OTHER; note = 2'-O-methyladenosine-3'-phosphorothioate
  modified_base 23: mod_base = OTHER; note = 2'-O-methylcytidine
taagtttggacaggttaaacgac

SEQ ID NO: 13159 - RNA, 23 nt, synthetic construct
  source 1..23: mol_type = other RNA
  modified_base 1: mod_base = OTHER; note = 2'-O-methyluridine-3'-phosphorothioate 5'-(E)-Vinylphosphonate
  modified_base 2: mod_base = OTHER; note = 2'-deoxy-2'-fluoroadenosine-3'-phosphorothioate
  modified_base 3: mod_base = OTHER; note = 2'-O-methylguanosine-3'-phosphate
  modified_base 4: mod_base = OTHER; note = 2'-O-methyladenosine-3'-phosphate
  modified_base 5: mod_base = OTHER; note = 2'-O-methyladenosine-3'-phosphate
  modified_base 6: mod_base = OTHER; note = 2'-deoxy-2'-fluoroguanosine-3'-phosphate
  modified_base 7: mod_base = OTHER; note = 2'-O-methyluridine-3'-phosphate
  modified_base 8: mod_base = OTHER; note = 2'-O-methyluridine-3'-phosphate
  modified_base 9: mod_base = OTHER; note = 2'-O-methyluridine-3'-phosphate
  modified_base 10: mod_base = OTHER; note = 2'-O-methylguanosine-3'-phosphate
  modified_base 11: mod_base = OTHER; note = 2'-O-methylguanosine-3'-phosphate
  modified_base 12: mod_base = OTHER; note = 2'-O-methyladenosine-3'-phosphate
  modified_base 13: mod_base = OTHER; note = 2'-O-methylcytidine-3'-phosphate
  modified_base 14: mod_base = OTHER; note = 2'-deoxy-2'-fluoroadenosine-3'-phosphate
  modified_base 15: mod_base = OTHER; note = 2'-O-methylguanosine-3'-phosphate
  modified_base 16: mod_base = OTHER; note = 2'-deoxy-2'-fluoroguanosine-3'-phosphate
  modified_base 17: mod_base = OTHER; note = 2'-O-methyluridine-3'-phosphate
  modified_base 18: mod_base = OTHER; note = 2'-O-methyluridine-3'-phosphate
  modified_base 19: mod_base = OTHER; note = 2'-O-methyladenosine-3'-phosphate
  modified_base 20: mod_base = OTHER; note = 2'-O-methyladenosine-3'-phosphate
  modified_base 21: mod_base = OTHER; note = 2'-O-methyladenosine-3'-phosphorothioate
  modified_base 22: mod_base = OTHER; note = 2'-O-methylcytidine-3'-phosphorothioate
  modified_base 23: mod_base = OTHER; note = 2'-O-methylguanosine
tagaagtttggacaggttaaacg

SEQ ID NO: 13160 - RNA, 23 nt, synthetic construct
  source 1..23: mol_type = other RNA
  modified_base 1: mod_base = OTHER; note = 2'-O-methyluridine-3'-phosphorothioate 5'-(E)-Vinylphosphonate
  modified_base 2: mod_base = OTHER; note = 2'-deoxy-2'-fluorouridine-3'-phosphorothioate
  modified_base 3: mod_base = OTHER; note = 2'-O-methyladenosine-3'-phosphate
  modified_base 4: mod_base = OTHER; note = 2'-O-methylguanosine-3'-phosphate
  modified_base 5: mod_base = OTHER; note = 2'-O-methyladenosine-3'-phosphate
  modified_base 6: mod_base = OTHER; note = 2'-deoxy-2'-fluoroadenosine-3'-phosphate
  modified_base 7: mod_base = OTHER; note = 2'-O-methylguanosine-3'-phosphate
  modified_base 8: mod_base = OTHER; note = 2'-O-methyluridine-3'-phosphate
  modified_base 9: mod_base = OTHER; note = 2'-O-methyluridine-3'-phosphate
  modified_base 10: mod_base = OTHER; note = 2'-O-methyluridine-3'-phosphate
  modified_base 11: mod_base = OTHER; note = 2'-O-methylguanosine-3'-phosphate
  modified_base 12: mod_base = OTHER; note = 2'-O-methylguanosine-3'-phosphate
  modified_base 13: mod_base = OTHER; note = 2'-O-methyladenosine-3'-phosphate
  modified_base 14: mod_base = OTHER; note = 2'-deoxy-2'-fluorocytidine-3'-phosphate
  modified_base 15: mod_base = OTHER; note = 2'-O-methyladenosine-3'-phosphate
  modified_base 16: mod_base = OTHER; note = 2'-deoxy-2'-fluoroguanosine-3'-phosphate
  modified_base 17: mod_base = OTHER; note = 2'-O-methylguanosine-3'-phosphate
  modified_base 18: mod_base = OTHER; note = 2'-O-methyluridine-3'-phosphate
  modified_base 19: mod_base = OTHER; note = 2'-O-methyluridine-3'-phosphate
  modified_base 20: mod_base = OTHER; note = 2'-O-methyladenosine-3'-phosphate
  modified_base 21: mod_base = OTHER; note = 2'-O-methyladenosine-3'-phosphorothioate
  modified_base 22: mod_base = OTHER; note = 2'-O-methyladenosine-3'-phosphorothioate
  modified_base 23: mod_base = OTHER; note = 2'-O-methylcytidine
ttagaagtttggacaggttaaac

SEQ ID NO: 13161 - RNA, 23 nt, synthetic construct
  source 1..23: mol_type = other RNA
  modified_base 1: mod_base = OTHER; note = 2'-O-methyluridine-3'-phosphorothioate 5'-(E)-Vinylphosphonate
  modified_base 2: mod_base = OTHER; note = 2'-deoxy-2'-fluoroguanosine-3'-phosphorothioate
  modified_base 3: mod_base = OTHER; note = 2'-O-methyluridine-3'-phosphate
  modified_base 4: mod_base = OTHER; note = 2'-O-methyladenosine-3'-phosphate
  modified_base 5: mod_base = OTHER; note = 2'-O-methylguanosine-3'-phosphate
  modified_base 6: mod_base = OTHER; note = 2'-deoxy-2'-fluoroadenosine-3'-phosphate
  modified_base 7: mod_base = OTHER; note = 2'-O-methyladenosine-3'-phosphate
  modified_base 8: mod_base = OTHER; note = 2'-O-methylguanosine-3'-phosphate
  modified_base 9: mod_base = OTHER; note = 2'-O-methyluridine-3'-phosphate
  modified_base 10: mod_base = OTHER; note = 2'-O-methyluridine-3'-phosphate
  modified_base 11: mod_base = OTHER; note = 2'-O-methyluridine-3'-phosphate
  modified_base 12: mod_base = OTHER; note = 2'-O-methylguanosine-3'-phosphate
  modified_base 13: mod_base = OTHER; note = 2'-O-methylguanosine-3'-phosphate
  modified_base 14: mod_base = OTHER; note = 2'-deoxy-2'-fluoroadenosine-3'-phosphate
  modified_base 15: mod_base = OTHER; note = 2'-O-methylcytidine-3'-phosphate
  modified_base 16: mod_base = OTHER; note = 2'-deoxy-2'-fluoroadenosine-3'-phosphate
  modified_base 17: mod_base = OTHER; note = 2'-O-methylguanosine-3'-phosphate
  modified_base 18: mod_base = OTHER; note = 2'-O-methylguanosine-3'-phosphate
  modified_base 19: mod_base = OTHER; note = 2'-O-methyluridine-3'-phosphate
  modified_base 20: mod_base = OTHER; note = 2'-O-methyluridine-3'-phosphate
  modified_base 21: mod_base = OTHER; note = 2'-O-methyladenosine-3'-phosphorothioate
  modified_base 22: mod_base = OTHER; note = 2'-O-methyladenosine-3'-phosphorothioate
  modified_base 23: mod_base = OTHER; note = 2'-O-methyladenosine
tgtagaagtttggacaggttaaa

SEQ ID NO: 13162 - RNA, 23 nt, synthetic construct
  source 1..23: mol_type = other RNA
  modified_base 1: mod_base = OTHER; note = 2'-O-methyluridine-3'-phosphorothioate 5'-(E)-Vinylphosphonate
  modified_base 2: mod_base = OTHER; note = 2'-deoxy-2'-fluorouridine-3'-phosphorothioate
  modified_base 3: mod_base = OTHER; note = 2'-O-methylguanosine-3'-phosphate
  modified_base 4: mod_base = OTHER; note = 2'-O-methyluridine-3'-phosphate
  modified_base 5: mod_base = OTHER; note = 2'-O-methyladenosine-3'-phosphate
  modified_base 6: mod_base = OTHER; note = 2'-deoxy-2'-fluoroguanosine-3'-phosphate
  modified_base 7: mod_base = OTHER; note = 2'-O-methyladenosine-3'-phosphate
  modified_base 8: mod_base = OTHER; note = 2'-O-methyladenosine-3'-phosphate
  modified_base 9: mod_base = OTHER; note = 2'-O-methylguanosine-3'-phosphate
  modified_base 10: mod_base = OTHER; note = 2'-O-methyluridine-3'-phosphate
  modified_base 11: mod_base = OTHER; note = 2'-O-methyluridine-3'-phosphate
  modified_base 12: mod_base = OTHER; note = 2'-O-methyluridine-3'-phosphate
  modified_base 13: mod_base = OTHER; note = 2'-O-methylguanosine-3'-phosphate
  modified_base 14: mod_base = OTHER; note = 2'-deoxy-2'-fluoroguanosine-3'-phosphate
  modified_base 15: mod_base = OTHER; note = 2'-O-methyladenosine-3'-phosphate
  modified_base 16: mod_base = OTHER; note = 2'-deoxy-2'-fluorocytidine-3'-phosphate
  modified_base 17: mod_base = OTHER; note = 2'-O-methyladenosine-3'-phosphate
  modified_base 18: mod_base = OTHER; note = 2'-O-methylguanosine-3'-phosphate
  modified_base 19: mod_base = OTHER; note = 2'-O-methylguanosine-3'-phosphate
  modified_base 20: mod_base = OTHER; note = 2'-O-methyluridine-3'-phosphate
  modified_base 21: mod_base = OTHER; note = 2'-O-methyluridine-3'-phosphorothioate
  modified_base 22: mod_base = OTHER; note = 2'-O-methyladenosine-3'-phosphorothioate
  modified_base 23: mod_base = OTHER; note = 2'-O-methyladenosine
ttgtagaagtttggacaggttaa

SEQ ID NO: 13163 - RNA, 23 nt, synthetic construct
  source 1..23: mol_type = other RNA
  modified_base 1: mod_base = OTHER; note = 2'-O-methyluridine-3'-phosphorothioate 5'-(E)-Vinylphosphonate
  modified_base 2: mod_base = OTHER; note = 2'-deoxy-2'-fluoroguanosine-3'-phosphorothioate
  modified_base 3: mod_base = OTHER; note = 2'-O-methyluridine-3'-phosphate
  modified_base 4: mod_base = OTHER; note = 2'-O-methylguanosine-3'-phosphate
  modified_base 5: mod_base = OTHER; note = 2'-O-methyluridine-3'-phosphate
  modified_base 6: mod_base = OTHER; note = 2'-deoxy-2'-fluoroadenosine-3'-phosphate
  modified_base 7: mod_base = OTHER; note = 2'-O-methylguanosine-3'-phosphate
  modified_base 8: mod_base = OTHER; note = 2'-O-methyladenosine-3'-phosphate
  modified_base 9: mod_base = OTHER; note = 2'-O-methyladenosine-3'-phosphate
  modified_base 10: mod_base = OTHER; note = 2'-O-methylguanosine-3'-phosphate
  modified_base 11: mod_base = OTHER; note = 2'-O-methyluridine-3'-phosphate
  modified_base 12: mod_base = OTHER; note = 2'-O-methyluridine-3'-phosphate
  modified_base 13: mod_base = OTHER; note = 2'-O-methyluridine-3'-phosphate
  modified_base 14: mod_base = OTHER; note = 2'-deoxy-2'-fluoroguanosine-3'-phosphate
  modified_base 15: mod_base = OTHER; note = 2'-O-methylguanosine-3'-phosphate
  modified_base 16: mod_base = OTHER; note = 2'-deoxy-2'-fluoroadenosine-3'-phosphate
  modified_base 17: mod_base = OTHER; note = 2'-O-methylcytidine-3'-phosphate
  modified_base 18: mod_base = OTHER; note = 2'-O-methyladenosine-3'-phosphate
  modified_base 19: mod_base = OTHER; note = 2'-O-methylguanosine-3'-phosphate
  modified_base 20: mod_base = OTHER; note = 2'-O-methylguanosine-3'-phosphate
  modified_base 21: mod_base = OTHER; note = 2'-O-methyluridine-3'-phosphorothioate
  modified_base 22: mod_base = OTHER; note = 2'-O-methyluridine-3'-phosphorothioate
  modified_base 23: mod_base = OTHER; note = 2'-O-methyladenosine
tgtgtagaagtttggacaggtta

SEQ ID NO: 13164 - RNA, 23 nt, synthetic construct
  source 1..23: mol_type = other RNA
  modified_base 1: mod_base = OTHER; note = 2'-O-methyluridine-3'-phosphorothioate 5'-(E)-Vinylphosphonate
  modified_base 2: mod_base = OTHER; note = 2'-deoxy-2'-fluorouridine-3'-phosphorothioate
  modified_base 3: mod_base = OTHER; note = 2'-O-methylguanosine-3'-phosphate
  modified_base 4: mod_base = OTHER; note = 2'-O-methyluridine-3'-phosphate
  modified_base 5: mod_base = OTHER; note = 2'-O-methylguanosine-3'-phosphate
  modified_base 6: mod_base = OTHER; note = 2'-deoxy-2'-fluorouridine-3'-phosphate
  modified_base 7: mod_base = OTHER; note = 2'-O-methyladenosine-3'-phosphate
  modified_base 8: mod_base = OTHER; note = 2'-O-methylguanosine-3'-phosphate
  modified_base 9: mod_base = OTHER; note = 2'-O-methyladenosine-3'-phosphate
  modified_base 10: mod_base = OTHER; note = 2'-O-methyladenosine-3'-phosphate
  modified_base 11: mod_base = OTHER; note = 2'-O-methylguanosine-3'-phosphate
  modified_base 12: mod_base = OTHER; note = 2'-O-methyluridine-3'-phosphate
  modified_base 13: mod_base = OTHER; note = 2'-O-methyluridine-3'-phosphate
  modified_base 14: mod_base = OTHER; note = 2'-deoxy-2'-fluorouridine-3'-phosphate
  modified_base 15: mod_base = OTHER; note = 2'-O-methylguanosine-3'-phosphate
  modified_base 16: mod_base = OTHER; note = 2'-deoxy-2'-fluoroguanosine-3'-phosphate
  modified_base 17: mod_base = OTHER; note = 2'-O-methyladenosine-3'-phosphate
  modified_base 18: mod_base = OTHER; note = 2'-O-methylcytidine-3'-phosphate
  modified_base 19: mod_base = OTHER; note = 2'-O-methyladenosine-3'-phosphate
  modified_base 20: mod_base = OTHER; note = 2'-O-methylguanosine-3'-phosphate
  modified_base 21: mod_base = OTHER; note = 2'-O-methylguanosine-3'-phosphorothioate
  modified_base 22: mod_base = OTHER; note = 2'-O-methyluridine-3'-phosphorothioate
  modified_base 23: mod_base = OTHER; note = 2'-O-methyluridine
ttgtgtagaagtttggacaggtt

SEQ ID NO: 13165 - RNA, 23 nt, synthetic construct
  source 1..23: mol_type = other RNA
  modified_base 1: mod_base = OTHER; note = 2'-O-methyluridine-3'-phosphorothioate 5'-(E)-Vinylphosphonate
  modified_base 2: mod_base = OTHER; note = 2'-deoxy-2'-fluorouridine-3'-phosphorothioate
  modified_base 3: mod_base = OTHER; note = 2'-O-methyluridine-3'-phosphate
  modified_base 4: mod_base = OTHER; note = 2'-O-methylguanosine-3'-phosphate
  modified_base 5: mod_base = OTHER; note = 2'-O-methyluridine-3'-phosphate
  modified_base 6: mod_base = OTHER; note = 2'-deoxy-2'-fluoroguanosine-3'-phosphate
  modified_base 7: mod_base = OTHER; note = 2'-O-methyluridine-3'-phosphate
  modified_base 8: mod_base = OTHER; note = 2'-O-methyladenosine-3'-phosphate
  modified_base 9: mod_base = OTHER; note = 2'-O-methylguanosine-3'-phosphate
  modified_base 10: mod_base = OTHER; note = 2'-O-methyladenosine-3'-phosphate
  modified_base 11: mod_base = OTHER; note = 2'-O-methyladenosine-3'-phosphate
  modified_base 12: mod_base = OTHER; note = 2'-O-methylguanosine-3'-phosphate
  modified_base 13: mod_base = OTHER; note = 2'-O-methyluridine-3'-phosphate
  modified_base 14: mod_base = OTHER; note = 2'-deoxy-2'-fluorouridine-3'-phosphate
  modified_base 15: mod_base = OTHER; note = 2'-O-methyluridine-3'-phosphate
  modified_base 16: mod_base = OTHER; note = 2'-deoxy-2'-fluoroguanosine-3'-phosphate
  modified_base 17: mod_base = OTHER; note = 2'-O-methylguanosine-3'-phosphate
  modified_base 18: mod_base = OTHER; note = 2'-O-methyladenosine-3'-phosphate
  modified_base 19: mod_base = OTHER; note = 2'-O-methylcytidine-3'-phosphate
  modified_base 20: mod_base = OTHER; note = 2'-O-methyladenosine-3'-phosphate
  modified_base 21: mod_base = OTHER; note = 2'-O-methylguanosine-3'-phosphorothioate
  modified_base 22: mod_base = OTHER; note = 2'-O-methylguanosine-3'-phosphorothioate
  modified_base 23: mod_base = OTHER; note = 2'-O-methyluridine
tttgtgtagaagtttggacaggt

SEQ ID NO: 13166 - RNA, 23 nt, synthetic construct
  source 1..23: mol_type = other RNA
  modified_base 1: mod_base = OTHER; note = 2'-O-methyluridine-3'-phosphorothioate 5'-(E)-Vinylphosphonate
  modified_base 2: mod_base = OTHER; note = 2'-deoxy-2'-fluoroadenosine-3'-phosphorothioate
  modified_base 3: mod_base = OTHER; note = 2'-O-methyluridine-3'-phosphate
  modified_base 4: mod_base = OTHER; note = 2'-O-methyluridine-3'-phosphate
  modified_base 5: mod_base = OTHER; note = 2'-O-methylguanosine-3'-phosphate
  modified_base 6: mod_base = OTHER; note = 2'-deoxy-2'-fluorouridine-3'-phosphate
  modified_base 7: mod_base = OTHER; note = 2'-O-methylguanosine-3'-phosphate
  modified_base 8: mod_base = OTHER; note = 2'-O-methyluridine-3'-phosphate
  modified_base 9: mod_base = OTHER; note = 2'-O-methyladenosine-3'-phosphate
  modified_base 10: mod_base = OTHER; note = 2'-O-methylguanosine-3'-phosphate
  modified_base 11: mod_base = OTHER; note = 2'-O-methyladenosine-3'-phosphate
  modified_base 12: mod_base = OTHER; note = 2'-O-methyladenosine-3'-phosphate
  modified_base 13: mod_base = OTHER; note = 2'-O-methylguanosine-3'-phosphate
  modified_base 14: mod_base = OTHER; note = 2'-deoxy-2'-fluorouridine-3'-phosphate
  modified_base 15: mod_base = OTHER; note = 2'-O-methyluridine-3'-phosphate
  modified_base 16: mod_base = OTHER; note = 2'-deoxy-2'-fluorouridine-3'-phosphate
  modified_base 17: mod_base = OTHER; note = 2'-O-methylguanosine-3'-phosphate
  modified_base 18: mod_base = OTHER; note = 2'-O-methylguanosine-3'-phosphate
  modified_base 19: mod_base = OTHER; note = 2'-O-methyladenosine-3'-phosphate
  modified_base 20: mod_base = OTHER; note = 2'-O-methylcytidine-3'-phosphate
  modified_base 21: mod_base = OTHER; note = 2'-O-methyladenosine-3'-phosphorothioate
  modified_base 22: mod_base = OTHER; note = 2'-O-methylguanosine-3'-phosphorothioate
  modified_base 23: mod_base = OTHER; note = 2'-O-methylguanosine
tattgtgtagaagtttggacagg

SEQ ID NO: 13167 - RNA, 23 nt, synthetic construct
  source 1..23: mol_type = other RNA
  modified_base 1: mod_base = OTHER; note = 2'-O-methyluridine-3'-phosphorothioate 5'-(E)-Vinylphosphonate
  modified_base 2: mod_base = OTHER; note = 2'-deoxy-2'-fluorocytidine-3'-phosphorothioate
  modified_base 3: mod_base = OTHER; note = 2'-O-methyladenosine-3'-phosphate
  modified_base 4: mod_base = OTHER; note = 2'-O-methyluridine-3'-phosphate
  modified_base 5: mod_base = OTHER; note = 2'-O-methyluridine-3'-phosphate
  modified_base 6: mod_base = OTHER; note = 2'-deoxy-2'-fluoroguanosine-3'-phosphate
  modified_base 7: mod_base = OTHER; note = 2'-O-methyluridine-3'-phosphate
  modified_base 8: mod_base = OTHER; note = 2'-O-methylguanosine-3'-phosphate
  modified_base 9: mod_base = OTHER; note = 2'-O-methyluridine-3'-phosphate
  modified_base 10: mod_base = OTHER; note = 2'-O-methyladenosine-3'-phosphate
  modified_base 11: mod_base = OTHER; note = 2'-O-methylguanosine-3'-phosphate
  modified_base 12: mod_base = OTHER; note = 2'-O-methyladenosine-3'-phosphate
  modified_base 13: mod_base = OTHER; note = 2'-O-methyladenosine-3'-phosphate
  modified_base 14: mod_base = OTHER; note = 2'-deoxy-2'-fluoroguanosine-3'-phosphate
  modified_base 15: mod_base = OTHER; note = 2'-O-methyluridine-3'-phosphate
  modified_base 16: mod_base = OTHER; note = 2'-deoxy-2'-fluorouridine-3'-phosphate
  modified_base 17: mod_base = OTHER; note = 2'-O-methyluridine-3'-phosphate
  modified_base 18: mod_base = OTHER; note = 2'-O-methylguanosine-3'-phosphate
  modified_base 19: mod_base = OTHER; note = 2'-O-methylguanosine-3'-phosphate
  modified_base 20: mod_base = OTHER; note = 2'-O-methyladenosine-3'-phosphate
  modified_base 21: mod_base = OTHER; note = 2'-O-methylcytidine-3'-phosphorothioate
  modified_base 22: mod_base = OTHER; note = 2'-O-methyladenosine-3'-phosphorothioate
  modified_base 23: mod_base = OTHER; note = 2'-O-methylguanosine
tcattgtgtagaagtttggacag

SEQ ID NO: 13168 - RNA, 23 nt, synthetic construct
  source 1..23: mol_type = other RNA
  modified_base 1: mod_base = OTHER; note = 2'-O-methyluridine-3'-phosphorothioate 5'-(E)-Vinylphosphonate
  modified_base 2: mod_base = OTHER; note = 2'-deoxy-2'-fluorouridine-3'-phosphorothioate
  modified_base 3: mod_base = OTHER; note = 2'-O-methylcytidine-3'-phosphate
  modified_base 4: mod_base = OTHER; note = 2'-O-methyladenosine-3'-phosphate
  modified_base 5: mod_base = OTHER; note = 2'-O-methyluridine-3'-phosphate
  modified_base 6: mod_base = OTHER; note = 2'-deoxy-2'-fluorouridine-3'-phosphate
  modified_base 7: mod_base = OTHER; note = 2'-O-methylguanosine-3'-phosphate
  modified_base 8: mod_base = OTHER; note = 2'-O-methyluridine-3'-phosphate
  modified_base 9: mod_base = OTHER; note = 2'-O-methylguanosine-3'-phosphate
  modified_base 10: mod_base = OTHER; note = 2'-O-methyluridine-3'-phosphate
  modified_base 11: mod_base = OTHER; note = 2'-O-methyladenosine-3'-phosphate
  modified_base 12: mod_base = OTHER; note = 2'-O-methylguanosine-3'-phosphate
  modified_base 13: mod_base = OTHER; note = 2'-O-methyladenosine-3'-phosphate
  modified_base 14: mod_base = OTHER; note = 2'-deoxy-2'-fluoroadenosine-3'-phosphate
  modified_base 15: mod_base = OTHER; note = 2'-O-methylguanosine-3'-phosphate
  modified_base 16: mod_base = OTHER; note = 2'-deoxy-2'-fluorouridine-3'-phosphate
  modified_base 17: mod_base = OTHER; note = 2'-O-methyluridine-3'-phosphate
  modified_base 18: mod_base = OTHER; note = 2'-O-methyluridine-3'-phosphate
  modified_base 19: mod_base = OTHER; note = 2'-O-methylguanosine-3'-phosphate
  modified_base 20: mod_base = OTHER; note = 2'-O-methylguanosine-3'-phosphate
  modified_base 21: mod_base = OTHER; note = 2'-O-methyladenosine-3'-phosphorothioate
  modified_base 22: mod_base = OTHER; note = 2'-O-methylcytidine-3'-phosphorothioate
  modified_base 23: mod_base = OTHER; note = 2'-O-methyladenosine
ttcattgtgtagaagtttggaca

SEQ ID NO: 13169 - RNA, 23 nt, synthetic construct
  source 1..23: mol_type = other RNA
  modified_base 1: mod_base = OTHER; note = 2'-O-methyluridine-3'-phosphorothioate 5'-(E)-Vinylphosphonate
  modified_base 2: mod_base = OTHER; note = 2'-deoxy-2'-fluorouridine-3'-phosphorothioate
  modified_base 3: mod_base = OTHER; note = 2'-O-methyluridine-3'-phosphate
  modified_base 4: mod_base = OTHER; note = 2'-O-methylcytidine-3'-phosphate
  modified_base 5: mod_base = OTHER; note = 2'-O-methyladenosine-3'-phosphate
  modified_base 6: mod_base = OTHER; note = 2'-deoxy-2'-fluorouridine-3'-phosphate
  modified_base 7: mod_base = OTHER; note = 2'-O-methyluridine-3'-phosphate
  modified_base 8: mod_base = OTHER; note = 2'-O-methylguanosine-3'-phosphate
  modified_base 9: mod_base = OTHER; note = 2'-O-methyluridine-3'-phosphate
  modified_base 10: mod_base = OTHER; note = 2'-O-methylguanosine-3'-phosphate
  modified_base 11: mod_base = OTHER; note = 2'-O-methyluridine-3'-phosphate
  modified_base 12: mod_base = OTHER; note = 2'-O-methyladenosine-3'-phosphate
  modified_base 13: mod_base = OTHER; note = 2'-O-methylguanosine-3'-phosphate
  modified_base 14: mod_base = OTHER; note = 2'-deoxy-2'-fluoroadenosine-3'-phosphate
  modified_base 15: mod_base = OTHER; note = 2'-O-methyladenosine-3'-phosphate
  modified_base 16: mod_base = OTHER; note = 2'-deoxy-2'-fluoroguanosine-3'-phosphate
  modified_base 17: mod_base = OTHER; note = 2'-O-methyluridine-3'-phosphate
  modified_base 18: mod_base = OTHER; note = 2'-O-methyluridine-3'-phosphate
  modified_base 19: mod_base = OTHER; note = 2'-O-methyluridine-3'-phosphate
  modified_base 20: mod_base = OTHER; note = 2'-O-methylguanosine-3'-phosphate
  modified_base 21: mod_base = OTHER; note = 2'-O-methylguanosine-3'-phosphorothioate
  modified_base 22: mod_base = OTHER; note = 2'-O-methyladenosine-3'-phosphorothioate
  modified_base 23: mod_base = OTHER; note = 2'-O-methylcytidine
tttcattgtgtagaagtttggac

SEQ ID NO: 13170 - RNA, 23 nt, synthetic construct
  source 1..23: mol_type = other RNA
  modified_base 1: mod_base = OTHER; note = 2'-O-methyluridine-3'-phosphorothioate 5'-(E)-Vinylphosphonate
  modified_base 2: mod_base = OTHER; note = 2'-deoxy-2'-fluoroguanosine-3'-phosphorothioate
  modified_base 3: mod_base = OTHER; note = 2'-O-methyluridine-3'-phosphate
  modified_base 4: mod_base = OTHER; note = 2'-O-methyluridine-3'-phosphate
  modified_base 5: mod_base = OTHER; note = 2'-O-methylcytidine-3'-phosphate
  modified_base 6: mod_base = OTHER; note = 2'-deoxy-2'-fluoroadenosine-3'-phosphate
  modified_base 7: mod_base = OTHER; note = 2'-O-methyluridine-3'-phosphate
  modified_base 8: mod_base = OTHER; note = 2'-O-methyluridine-3'-phosphate
  modified_base 9: mod_base = OTHER; note = 2'-O-methylguanosine-3'-phosphate
  modified_base 10: mod_base = OTHER; note = 2'-O-methyluridine-3'-phosphate
  modified_base 11: mod_base = OTHER; note = 2'-O-methylguanosine-3'-phosphate
  modified_base 12: mod_base = OTHER; note = 2'-O-methyluridine-3'-phosphate
  modified_base 13: mod_base = OTHER; note = 2'-O-methyladenosine-3'-phosphate
  modified_base 14: mod_base = OTHER; note = 2'-deoxy-2'-fluoroguanosine-3'-phosphate
  modified_base 15: mod_base = OTHER; note = 2'-O-methyladenosine-3'-phosphate
  modified_base 16: mod_base = OTHER; note = 2'-deoxy-2'-fluoroadenosine-3'-phosphate
  modified_base 17: mod_base = OTHER; note = 2'-O-methylguanosine-3'-phosphate
  modified_base 18: mod_base = OTHER; note = 2'-O-methyluridine-3'-phosphate
  modified_base 19: mod_base = OTHER; note = 2'-O-methyluridine-3'-phosphate
  modified_base 20: mod_base = OTHER; note = 2'-O-methyluridine-3'-phosphate
  modified_base 21: mod_base = OTHER; note = 2'-O-methylguanosine-3'-phosphorothioate
  modified_base 22: mod_base = OTHER; note = 2'-O-methylguanosine-3'-phosphorothioate
  modified_base 23: mod_base = OTHER; note = 2'-O-methyladenosine
tgttcattgtgtagaagtttgga

SEQ ID NO: 13171 - RNA, 23 nt, synthetic construct
  source 1..23: mol_type = other RNA
  modified_base 1: mod_base = OTHER; note = 2'-O-methyluridine-3'-phosphorothioate 5'-(E)-Vinylphosphonate
  modified_base 2: mod_base = OTHER; note = 2'-deoxy-2'-fluoroadenosine-3'-phosphorothioate
  modified_base 3: mod_base = OTHER; note = 2'-O-methylguanosine-3'-phosphate
  modified_base 4: mod_base = OTHER; note = 2'-O-methyluridine-3'-phosphate
  modified_base 5: mod_base = OTHER; note = 2'-O-methyluridine-3'-phosphate
  modified_base 6: mod_base = OTHER; note = 2'-deoxy-2'-fluorocytidine-3'-phosphate
  modified_base 7: mod_base = OTHER; note = 2'-O-methyladenosine-3'-phosphate
  modified_base 8: mod_base = OTHER; note = 2'-O-methyluridine-3'-phosphate
  modified_base 9: mod_base = OTHER; note = 2'-O-methyluridine-3'-phosphate
  modified_base 10: mod_base = OTHER; note = 2'-O-methylguanosine-3'-phosphate
  modified_base 11: mod_base = OTHER; note = 2'-O-methyluridine-3'-phosphate
  modified_base 12: mod_base = OTHER; note = 2'-O-methylguanosine-3'-phosphate
  modified_base 13: mod_base = OTHER; note = 2'-O-methyluridine-3'-phosphate
  modified_base 14: mod_base = OTHER; note = 2'-deoxy-2'-fluoroadenosine-3'-phosphate
  modified_base 15: mod_base = OTHER; note = 2'-O-methylguanosine-3'-phosphate
  modified_base 16: mod_base = OTHER; note = 2'-deoxy-2'-fluoroadenosine-3'-phosphate
  modified_base 17: mod_base = OTHER; note = 2'-O-methyladenosine-3'-phosphate
  modified_base 18: mod_base = OTHER; note = 2'-O-methylguanosine-3'-phosphate
  modified_base 19: mod_base = OTHER; note = 2'-O-methyluridine-3'-phosphate
  modified_base 20: mod_base = OTHER; note = 2'-O-methyluridine-3'-phosphate
  modified_base 21: mod_base = OTHER; note = 2'-O-methyluridine-3'-phosphorothioate
  modified_base 22: mod_base = OTHER; note = 2'-O-methylguanosine-3'-phosphorothioate
  modified_base 23: mod_base = OTHER; note = 2'-O-methylguanosine
tagttcattgtgtagaagtttgg

SEQ ID NO: 13172 - RNA, 23 nt, synthetic construct
  source 1..23: mol_type = other RNA
  modified_base 1: mod_base = OTHER; note = 2'-O-methyluridine-3'-phosphorothioate 5'-(E)-Vinylphosphonate
  modified_base 2: mod_base = OTHER; note = 2'-deoxy-2'-fluoroadenosine-3'-phosphorothioate
  modified_base 3: mod_base = OTHER; note = 2'-O-methyladenosine-3'-phosphate
  modified_base 4: mod_base = OTHER; note = 2'-O-methylguanosine-3'-phosphate
  modified_base 5: mod_base = OTHER; note = 2'-O-methyluridine-3'-phosphate
  modified_base 6: mod_base = OTHER; note = 2'-deoxy-2'-fluorouridine-3'-phosphate
  modified_base 7: mod_base = OTHER; note = 2'-O-methylcytidine-3'-phosphate
  modified_base 8: mod_base = OTHER; note = 2'-O-methyladenosine-3'-phosphate
  modified_base 9: mod_base = OTHER; note = 2'-O-methyluridine-3'-phosphate
  modified_base 10: mod_base = OTHER; note = 2'-O-methyluridine-3'-phosphate
  modified_base 11: mod_base = OTHER; note = 2'-O-methylguanosine-3'-phosphate
  modified_base 12: mod_base = OTHER; note = 2'-O-methyluridine-3'-phosphate
  modified_base 13: mod_base = OTHER; note = 2'-O-methylguanosine-3'-phosphate
  modified_base 14: mod_base = OTHER; note = 2'-deoxy-2'-fluorouridine-3'-phosphate
  modified_base 15: mod_base = OTHER; note = 2'-O-methyladenosine-3'-phosphate
  modified_base 16: mod_base = OTHER; note = 2'-deoxy-2'-fluoroguanosine-3'-phosphate
  modified_base 17: mod_base = OTHER; note = 2'-O-methyladenosine-3'-phosphate
  modified_base 18: mod_base = OTHER; note = 2'-O-methyladenosine-3'-phosphate
  modified_base 19: mod_base = OTHER; note = 2'-O-methylguanosine-3'-phosphate
  modified_base 20: mod_base = OTHER; note = 2'-O-methyluridine-3'-phosphate
  modified_base 21: mod_base = OTHER; note = 2'-O-methyluridine-3'-phosphorothioate
  modified_base 22: mod_base = OTHER; note = 2'-O-methyluridine-3'-phosphorothioate
  modified_base 23: mod_base = OTHER; note = 2'-O-methylguanosine
taagttcattgtgtagaagtttg

SEQ ID NO: 13173 - RNA, 23 nt, synthetic construct
  source 1..23: mol_type = other RNA
  modified_base 1: mod_base = OTHER; note = 2'-O-methyluridine-3'-phosphorothioate 5'-(E)-Vinylphosphonate
  modified_base 2: mod_base = OTHER; note = 2'-deoxy-2'-fluoroguanosine-3'-phosphorothioate
  modified_base 3: mod_base = OTHER; note = 2'-O-methyladenosine-3'-phosphate
  modified_base 4: mod_base = OTHER; note = 2'-O-methyladenosine-3'-phosphate
  modified_base 5: mod_base = OTHER; note = 2'-O-methylguanosine-3'-phosphate
  modified_base 6: mod_base = OTHER; note = 2'-deoxy-2'-fluorouridine-3'-phosphate
  modified_base 7: mod_base = OTHER; note = 2'-O-methyluridine-3'-phosphate
  modified_base 8: mod_base = OTHER; note = 2'-O-methylcytidine-3'-phosphate
  modified_base 9: mod_base = OTHER; note = 2'-O-methyladenosine-3'-phosphate
  modified_base 10: mod_base = OTHER; note = 2'-O-methyluridine-3'-phosphate
  modified_base 11: mod_base = OTHER; note = 2'-O-methyluridine-3'-phosphate
  modified_base 12: mod_base = OTHER; note = 2'-O-methylguanosine-3'-phosphate
  modified_base 13: mod_base = OTHER; note = 2'-O-methyluridine-3'-phosphate
  modified_base 14: mod_base = OTHER; note = 2'-deoxy-2'-fluoroguanosine-3'-phosphate
  modified_base 15: mod_base = OTHER; note = 2'-O-methyluridine-3'-phosphate
  modified_base 16: mod_base = OTHER; note = 2'-deoxy-2'-fluoroadenosine-3'-phosphate
  modified_base 17: mod_base = OTHER; note = 2'-O-methylguanosine-3'-phosphate
  modified_base 18: mod_base = OTHER; note = 2'-O-methyladenosine-3'-phosphate
  modified_base 19: mod_base = OTHER; note = 2'-O-methyladenosine-3'-phosphate
  modified_base 20: mod_base = OTHER; note = 2'-O-methylguanosine-3'-phosphate
  modified_base 21: mod_base = OTHER; note = 2'-O-methyluridine-3'-phosphorothioate
  modified_base 22: mod_base = OTHER; note = 2'-O-methyluridine-3'-phosphorothioate
  modified_base 23: mod_base = OTHER; note = 2'-O-methyluridine
tgaagttcattgtgtagaagttt

SEQ ID NO: 13174 - RNA, 23 nt, synthetic construct
  source 1..23: mol_type = other RNA
  modified_base 1: mod_base = OTHER; note = 2'-O-methyluridine-3'-phosphorothioate 5'-(E)-Vinylphosphonate
  modified_base 2: mod_base = OTHER; note = 2'-deoxy-2'-fluoroadenosine-3'-phosphorothioate
  modified_base 3: mod_base = OTHER; note = 2'-O-methylguanosine-3'-phosphate
  modified_base 4: mod_base = OTHER; note = 2'-O-methyladenosine-3'-phosphate
  modified_base 5: mod_base = OTHER; note = 2'-O-methyladenosine-3'-phosphate
  modified_base 6: mod_base = OTHER; note = 2'-deoxy-2'-fluoroguanosine-3'-phosphate
  modified_base 7: mod_base = OTHER; note = 2'-O-methyluridine-3'-phosphate
  modified_base 8: mod_base = OTHER; note = 2'-O-methyluridine-3'-phosphate
  modified_base 9: mod_base = OTHER; note = 2'-O-methylcytidine-3'-phosphate
  modified_base 10: mod_base = OTHER; note = 2'-O-methyladenosine-3'-phosphate
  modified_base 11: mod_base = OTHER; note = 2'-O-methyluridine-3'-phosphate
  modified_base 12: mod_base = OTHER; note = 2'-O-methyluridine-3'-phosphate
  modified_base 13: mod_base = OTHER; note = 2'-O-methylguanosine-3'-phosphate
  modified_base 14: mod_base = OTHER; note = 2'-deoxy-2'-fluorouridine-3'-phosphate
  modified_base 15: mod_base = OTHER; note = 2'-O-methylguanosine-3'-phosphate
  modified_base 16: mod_base = OTHER; note = 2'-deoxy-2'-fluorouridine-3'-phosphate
  modified_base 17: mod_base = OTHER; note = 2'-O-methyladenosine-3'-phosphate
  modified_base 18: mod_base = OTHER; note = 2'-O-methylguanosine-3'-phosphate
  modified_base 19: mod_base = OTHER; note = 2'-O-methyladenosine-3'-phosphate
  modified_base 20: mod_base = OTHER; note = 2'-O-methyladenosine-3'-phosphate
  modified_base 21: mod_base = OTHER; note = 2'-O-methylguanosine-3'-phosphorothioate
  modified_base 22: mod_base = OTHER; note = 2'-O-methyluridine-3'-phosphorothioate
  modified_base 23: mod_base = OTHER; note = 2'-O-methyluridine
tagaagttcattgtgtagaagtt

SEQ ID NO: 13175 - RNA, 23 nt, synthetic construct
  source 1..23: mol_type = other RNA
  modified_base 1: mod_base = OTHER; note = 2'-O-methyluridine-3'-phosphorothioate 5'-(E)-Vinylphosphonate
  modified_base 2: mod_base = OTHER; note = 2'-deoxy-2'-fluoroadenosine-3'-phosphorothioate
  modified_base 3: mod_base = OTHER; note = 2'-O-methyladenosine-3'-phosphate
  modified_base 4: mod_base = OTHER; note = 2'-O-methylguanosine-3'-phosphate
  modified_base 5: mod_base = OTHER; note = 2'-O-methyladenosine-3'-phosphate
  modified_base 6: mod_base = OTHER; note = 2'-deoxy-2'-fluoroadenosine-3'-phosphate
  modified_base 7: mod_base = OTHER; note = 2'-O-methylguanosine-3'-phosphate
  modified_base 8: mod_base = OTHER; note = 2'-O-methyluridine-3'-phosphate
  modified_base 9: mod_base = OTHER; note = 2'-O-methyluridine-3'-phosphate
  modified_base 10: mod_base = OTHER; note = 2'-O-methylcytidine-3'-phosphate
  modified_base 11: mod_base = OTHER; note = 2'-O-methyladenosine-3'-phosphate
  modified_base 12: mod_base = OTHER; note = 2'-O-methyluridine-3'-phosphate
  modified_base 13: mod_base = OTHER; note = 2'-O-methyluridine-3'-phosphate
  modified_base 14: mod_base = OTHER; note = 2'-deoxy-2'-fluoroguanosine-3'-phosphate
  modified_base 15: mod_base = OTHER; note = 2'-O-methyluridine-3'-phosphate
  modified_base 16: mod_base = OTHER; note = 2'-deoxy-2'-fluoroguanosine-3'-phosphate
  modified_base 17: mod_base = OTHER; note = 2'-O-methyluridine-3'-phosphate
  modified_base 18: mod_base = OTHER; note = 2'-O-methyladenosine-3'-phosphate
  modified_base 19: mod_base = OTHER; note = 2'-O-methylguanosine-3'-phosphate
  modified_base 20: mod_base = OTHER; note = 2'-O-methyladenosine-3'-phosphate
  modified_base 21: mod_base = OTHER; note = 2'-O-methyladenosine-3'-phosphorothioate
  modified_base 22: mod_base = OTHER; note = 2'-O-methylguanosine-3'-phosphorothioate
  modified_base 23: mod_base = OTHER; note = 2'-O-methyluridine
taagaagttcattgtgtagaagt

SEQ ID NO: 13176 - RNA, 23 nt, synthetic construct
  source 1..23: mol_type = other RNA
  modified_base 1: mod_base = OTHER; note = 2'-O-methyluridine-3'-phosphorothioate 5'-(E)-Vinylphosphonate
  modified_base 2: mod_base = OTHER; note = 2'-deoxy-2'-fluorouridine-3'-phosphorothioate
  modified_base 3: mod_base = OTHER; note = 2'-O-methyladenosine-3'-phosphate
  modified_base 4: mod_base = OTHER; note = 2'-O-methyladenosine-3'-phosphate
  modified_base 5: mod_base = OTHER; note = 2'-O-methylguanosine-3'-phosphate
  modified_base 6: mod_base = OTHER; note = 2'-deoxy-2'-fluoroadenosine-3'-phosphate
  modified_base 7: mod_base = OTHER; note = 2'-O-methyladenosine-3'-phosphate
  modified_base 8: mod_base = OTHER; note = 2'-O-methylguanosine-3'-phosphate
  modified_base 9: mod_base = OTHER; note = 2'-O-methyluridine-3'-phosphate
  modified_base 10: mod_base = OTHER; note = 2'-O-methyluridine-3'-phosphate
  modified_base 11: mod_base = OTHER; note = 2'-O-methylcytidine-3'-phosphate
  modified_base 12: mod_base = OTHER; note = 2'-O-methyladenosine-3'-phosphate
  modified_base 13: mod_base = OTHER; note = 2'-O-methyluridine-3'-phosphate
  modified_base 14: mod_base = OTHER; note = 2'-deoxy-2'-fluorouridine-3'-phosphate
  modified_base 15: mod_base = OTHER; note = 2'-O-methylguanosine-3'-phosphate
  modified_base 16: mod_base = OTHER; note = 2'-deoxy-2'-fluorouridine-3'-phosphate
  modified_base 17: mod_base = OTHER; note = 2'-O-methylguanosine-3'-phosphate
  modified_base 18: mod_base = OTHER; note = 2'-O-methyluridine-3'-phosphate
  modified_base 19: mod_base = OTHER; note = 2'-O-methyladenosine-3'-phosphate
  modified_base 20: mod_base = OTHER; note = 2'-O-methylguanosine-3'-phosphate
  modified_base 21: mod_base = OTHER; note = 2'-O-methyladenosine-3'-phosphorothioate
  modified_base 22: mod_base = OTHER; note = 2'-O-methyladenosine-3'-phosphorothioate
  modified_base 23: mod_base = OTHER; note = 2'-O-methylguanosine
ttaagaagttcattgtgtagaag

SEQ ID NO: 13177 - RNA, 23 nt, synthetic construct
  source 1..23: mol_type = other RNA
  modified_base 1: mod_base = OTHER; note = 2'-O-methyluridine-3'-phosphorothioate 5'-(E)-Vinylphosphonate
  modified_base 2: mod_base = OTHER; note = 2'-deoxy-2'-fluoroguanosine-3'-phosphorothioate
  modified_base 3: mod_base = OTHER; note = 2'-O-methyluridine-3'-phosphate
  modified_base 4: mod_base = OTHER; note = 2'-O-methyluridine-3'-phosphate
  modified_base 5: mod_base = OTHER; note = 2'-O-methyladenosine-3'-phosphate
  modified_base 6: mod_base = OTHER; note = 2'-deoxy-2'-fluoroadenosine-3'-phosphate
  modified_base 7: mod_base = OTHER; note = 2'-O-methylguanosine-3'-phosphate
  modified_base 8: mod_base = OTHER; note = 2'-O-methyladenosine-3'-phosphate
  modified_base 9: mod_base = OTHER; note = 2'-O-methyladenosine-3'-phosphate
  modified_base 10: mod_base = OTHER; note = 2'-O-methylguanosine-3'-phosphate
  modified_base 11: mod_base = OTHER; note = 2'-O-methyluridine-3'-phosphate
  modified_base 12: mod_base = OTHER; note = 2'-O-methyluridine-3'-phosphate
  modified_base 13: mod_base = OTHER; note = 2'-O-methylcytidine-3'-phosphate
  modified_base 14: mod_base = OTHER; note = 2'-deoxy-2'-fluoroadenosine-3'-phosphate
  modified_base 15: mod_base = OTHER; note = 2'-O-methyluridine-3'-phosphate
  modified_base 16: mod_base = OTHER; note = 2'-deoxy-2'-fluorouridine-3'-phosphate
  modified_base 17: mod_base = OTHER; note = 2'-O-methylguanosine-3'-phosphate
  modified_base 18: mod_base = OTHER; note = 2'-O-methyluridine-3'-phosphate
  modified_base 19: mod_base = OTHER; note = 2'-O-methylguanosine-3'-phosphate
  modified_base 20: mod_base = OTHER; note = 2'-O-methyluridine-3'-phosphate
  modified_base 21: mod_base = OTHER; note = 2'-O-methyladenosine-3'-phosphorothioate
  modified_base 22: mod_base = OTHER; note = 2'-O-methylguanosine-3'-phosphorothioate
  modified_base 23: mod_base = OTHER; note = 2'-O-methyladenosine
tgttaagaagttcattgtgtaga

SEQ ID NO: 13178 - RNA, 23 nt, synthetic construct
  source 1..23: mol_type = other RNA
  modified_base 1: mod_base = OTHER; note = 2'-O-methyluridine-3'-phosphorothioate 5'-(E)-Vinylphosphonate
  modified_base 2: mod_base = OTHER; note = 2'-deoxy-2'-fluorouridine-3'-phosphorothioate
  modified_base 3: mod_base = OTHER; note = 2'-O-methylguanosine-3'-phosphate
  modified_base 4: mod_base = OTHER; note = 2'-O-methyluridine-3'-phosphate
  modified_base 5: mod_base = OTHER; note = 2'-O-methyluridine-3'-phosphate
  modified_base 6: mod_base = OTHER; note = 2'-deoxy-2'-fluoroadenosine-3'-phosphate
  modified_base 7: mod_base = OTHER; note = 2'-O-methyladenosine-3'-phosphate
  modified_base 8: mod_base = OTHER; note = 2'-O-methylguanosine-3'-phosphate
  modified_base 9: mod_base = OTHER; note = 2'-O-methyladenosine-3'-phosphate
  modified_base 10: mod_base = OTHER; note = 2'-O-methyladenosine-3'-phosphate
  modified_base 11: mod_base = OTHER; note = 2'-O-methylguanosine-3'-phosphate
  modified_base 12: mod_base = OTHER; note = 2'-O-methyluridine-3'-phosphate
  modified_base 13: mod_base = OTHER; note = 2'-O-methyluridine-3'-phosphate
  modified_base 14: mod_base = OTHER; note = 2'-deoxy-2'-fluorocytidine-3'-phosphate
  modified_base 15: mod_base = OTHER; note = 2'-O-methyladenosine-3'-phosphate
  modified_base 16: mod_base = OTHER; note = 2'-deoxy-2'-fluorouridine-3'-phosphate
  modified_base 17: mod_base = OTHER; note = 2'-O-methyluridine-3'-phosphate
  modified_base 18: mod_base = OTHER; note = 2'-O-methylguanosine-3'-phosphate
  modified_base 19: mod_base = OTHER; note = 2'-O-methyluridine-3'-phosphate
  modified_base 20: mod_base = OTHER; note = 2'-O-methylguanosine-3'-phosphate
  modified_base 21: mod_base = OTHER; note = 2'-O-methyluridine-3'-phosphorothioate
  modified_base 22: mod_base = OTHER; note = 2'-O-methyladenosine-3'-phosphorothioate
  modified_base 23: mod_base = OTHER; note = 2'-O-methylguanosine
ttgttaagaagttcattgtgtag

SEQ ID NO: 13179 - RNA, 23 nt, synthetic construct
  source 1..23: mol_type = other RNA
  modified_base 1: mod_base = OTHER; note = 2'-O-methyluridine-3'-phosphorothioate 5'-(E)-Vinylphosphonate
  modified_base 2: mod_base = OTHER; note = 2'-deoxy-2'-fluorouridine-3'-phosphorothioate
  modified_base 3: mod_base = OTHER; note = 2'-O-methyluridine-3'-phosphate
  modified_base 4: mod_base = OTHER; note = 2'-O-methylguanosine-3'-phosphate
  modified_base 5: mod_base = OTHER; note = 2'-O-methyluridine-3'-phosphate
  modified_base 6: mod_base = OTHER; note = 2'-deoxy-2'-fluorouridine-3'-phosphate
  modified_base 7: mod_base = OTHER; note = 2'-O-methyladenosine-3'-phosphate
  modified_base 8: mod_base = OTHER; note = 2'-O-methyladenosine-3'-phosphate
  modified_base 9: mod_base = OTHER; note = 2'-O-methylguanosine-3'-phosphate
  modified_base 10: mod_base = OTHER; note = 2'-O-methyladenosine-3'-phosphate
  modified_base 11: mod_base = OTHER; note = 2'-O-methyladenosine-3'-phosphate
  modified_base 12: mod_base = OTHER; note = 2'-O-methylguanosine-3'-phosphate
  modified_base 13: mod_base = OTHER; note = 2'-O-methyluridine-3'-phosphate
  modified_base 14: mod_base = OTHER; note = 2'-deoxy-2'-fluorouridine-3'-phosphate
  modified_base 15: mod_base = OTHER; note = 2'-O-methylcytidine-3'-phosphate
  modified_base 16: mod_base = OTHER; note = 2'-deoxy-2'-fluoroadenosine-3'-phosphate
  modified_base 17: mod_base = OTHER; note = 2'-O-methyluridine-3'-phosphate
  modified_base 18: mod_base = OTHER; note = 2'-O-methyluridine-3'-phosphate
  modified_base 19: mod_base = OTHER; note = 2'-O-methylguanosine-3'-phosphate
  modified_base 20: mod_base = OTHER; note = 2'-O-methyluridine-3'-phosphate
  modified_base 21: mod_base = OTHER; note = 2'-O-methylguanosine-3'-phosphorothioate
  modified_base 22: mod_base = OTHER; note = 2'-O-methyluridine-3'-phosphorothioate
  modified_base 23: mod_base = OTHER; note = 2'-O-methyladenosine
tttgttaagaagttcattgtgta

SEQ ID NO: 13180 - RNA, 23 nt, synthetic construct
  source 1..23: mol_type = other RNA
  modified_base 1: mod_base = OTHER; note = 2'-O-methyluridine-3'-phosphorothioate 5'-(E)-Vinylphosphonate
  modified_base 2: mod_base = OTHER; note = 2'-deoxy-2'-fluorocytidine-3'-phosphorothioate
  modified_base 3: mod_base = OTHER; note = 2'-O-methyluridine-3'-phosphate
  modified_base 4: mod_base = OTHER; note = 2'-O-methyluridine-3'-phosphate
  modified_base 5: mod_base = OTHER; note = 2'-O-methylguanosine-3'-phosphate
  modified_base 6: mod_base = OTHER; note = 2'-deoxy-2'-fluorouridine-3'-phosphate
  modified_base 7: mod_base = OTHER; note = 2'-O-methyluridine-3'-phosphate
  modified_base 8: mod_base = OTHER; note = 2'-O-methyladenosine-3'-phosphate
  modified_base 9: mod_base = OTHER; note = 2'-O-methyladenosine-3'-phosphate
  modified_base 10: mod_base = OTHER; note = 2'-O-methylguanosine-3'-phosphate
  modified_base 11: mod_base = OTHER; note = 2'-O-methyladenosine-3'-phosphate
  modified_base 12: mod_base = OTHER; note = 2'-O-methyladenosine-3'-phosphate
  modified_base 13: mod_base = OTHER; note = 2'-O-methylguanosine-3'-phosphate
  modified_base 14: mod_base = OTHER; note = 2'-deoxy-2'-fluorouridine-3'-phosphate
  modified_base 15: mod_base = OTHER; note = 2'-O-methyluridine-3'-phosphate
  modified_base 16: mod_base = OTHER; note = 2'-deoxy-2'-fluorocytidine-3'-phosphate
  modified_base 17: mod_base = OTHER; note = 2'-O-methyladenosine-3'-phosphate
  modified_base 18: mod_base = OTHER; note = 2'-O-methyluridine-3'-phosphate
  modified_base 19: mod_base = OTHER; note = 2'-O-methyluridine-3'-phosphate
  modified_base 20: mod_base = OTHER; note = 2'-O-methylguanosine-3'-phosphate
  modified_base 21: mod_base = OTHER; note = 2'-O-methyluridine-3'-phosphorothioate
  modified_base 22: mod_base = OTHER; note = 2'-O-methylguanosine-3'-phosphorothioate
  modified_base 23: mod_base = OTHER; note = 2'-O-methyluridine
tcttgttaagaagttcattgtgt

SEQ ID NO: 13181 - RNA, 23 nt, synthetic construct
  source 1..23: mol_type = other RNA
  modified_base 1: mod_base = OTHER; note = 2'-O-methyluridine-3'-phosphorothioate 5'-(E)-Vinylphosphonate
  modified_base 2: mod_base = OTHER; note = 2'-deoxy-2'-fluorouridine-3'-phosphorothioate
  modified_base 3: mod_base = OTHER; note = 2'-O-methylcytidine-3'-phosphate
  modified_base 4: mod_base = OTHER; note = 2'-O-methyluridine-3'-phosphate
  modified_base 5: mod_base = OTHER; note = 2'-O-methyluridine-3'-phosphate
  modified_base 6: mod_base = OTHER; note = 2'-deoxy-2'-fluoroguanosine-3'-phosphate
  modified_base 7: mod_base = OTHER; note = 2'-O-methyluridine-3'-phosphate
  modified_base 8: mod_base = OTHER; note = 2'-O-methyluridine-3'-phosphate
  modified_base 9: mod_base = OTHER; note = 2'-O-methyladenosine-3'-phosphate
  modified_base 10: mod_base = OTHER; note = 2'-O-methyladenosine-3'-phosphate
  modified_base 11: mod_base = OTHER; note = 2'-O-methylguanosine-3'-phosphate
  modified_base 12: mod_base = OTHER; note = 2'-O-methyladenosine-3'-phosphate
  modified_base 13: mod_base = OTHER; note = 2'-O-methyladenosine-3'-phosphate
  modified_base 14: mod_base = OTHER; note = 2'-deoxy-2'-fluoroguanosine-3'-phosphate
  modified_base 15: mod_base = OTHER; note = 2'-O-methyluridine-3'-phosphate
  modified_base 16: mod_base = OTHER; note = 2'-deoxy-2'-fluorouridine-3'-phosphate
  modified_base 17: mod_base = OTHER; note = 2'-O-methylcytidine-3'-phosphate
  modified_base 18: mod_base = OTHER; note = 2'-O-methyladenosine-3'-phosphate
  modified_base 19: mod_base = OTHER; note = 2'-O-methyluridine-3'-phosphate
  modified_base 20: mod_base = OTHER; note = 2'-O-methyluridine-3'-phosphate
  modified_base 21: mod_base = OTHER; note = 2'-O-methylguanosine-3'-phosphorothioate
  modified_base 22: mod_base = OTHER; note = 2'-O-methyluridine-3'-phosphorothioate
  modified_base 23: mod_base = OTHER; note = 2'-O-methylguanosine
ttcttgttaagaagttcattgtg

SEQ ID NO: 13182 - RNA, 23 nt, synthetic construct
  source 1..23: mol_type = other RNA
  modified_base 1: mod_base = OTHER; note = 2'-O-methyluridine-3'-phosphorothioate 5'-(E)-Vinylphosphonate
  modified_base 2: mod_base = OTHER; note = 2'-deoxy-2'-fluoroadenosine-3'-phosphorothioate
  modified_base 3: mod_base = OTHER; note = 2'-O-methyluridine-3'-phosphate
  modified_base 4: mod_base = OTHER; note = 2'-O-methylcytidine-3'-phosphate
  modified_base 5: mod_base = OTHER; note = 2'-O-methyluridine-3'-phosphate
  modified_base 6: mod_base = OTHER; note = 2'-deoxy-2'-fluorouridine-3'-phosphate
  modified_base 7: mod_base = OTHER; note = 2'-O-methylguanosine-3'-phosphate
  modified_base 8: mod_base = OTHER; note = 2'-O-methyluridine-3'-phosphate
  modified_base 9: mod_base = OTHER; note = 2'-O-methyluridine-3'-phosphate
  modified_base 10: mod_base = OTHER; note = 2'-O-methyladenosine-3'-phosphate
  modified_base 11: mod_base = OTHER; note = 2'-O-methyladenosine-3'-phosphate
  modified_base 12: mod_base = OTHER; note = 2'-O-methylguanosine-3'-phosphate
  modified_base 13: mod_base = OTHER; note = 2'-O-methyladenosine-3'-phosphate
  modified_base 14: mod_base = OTHER; note = 2'-deoxy-2'-fluoroadenosine-3'-phosphate
  modified_base 15: mod_base = OTHER; note = 2'-O-methylguanosine-3'-phosphate
  modified_base 16: mod_base = OTHER; note = 2'-deoxy-2'-fluorouridine-3'-phosphate
  modified_base 17: mod_base = OTHER; note = 2'-O-methyluridine-3'-phosphate
  modified_base 18: mod_base = OTHER; note = 2'-O-methylcytidine-3'-phosphate
  modified_base 19: mod_base = OTHER; note = 2'-O-methyladenosine-3'-phosphate
  modified_base 20: mod_base = OTHER; note = 2'-O-methyluridine-3'-phosphate
  modified_base 21: mod_base = OTHER; note = 2'-O-methyluridine-3'-phosphorothioate
  modified_base 22: mod_base = OTHER; note = 2'-O-methylguanosine-3'-phosphorothioate
  modified_base 23: mod_base = OTHER; note = 2'-O-methyluridine
tatcttgttaagaagttcattgt

SEQ ID NO: 13183 - RNA, 23 nt, synthetic construct
  source 1..23: mol_type = other RNA
  modified_base 1: mod_base = OTHER; note = 2'-O-methyluridine-3'-phosphorothioate 5'-(E)-Vinylphosphonate
  modified_base 2: mod_base = OTHER; note = 2'-deoxy-2'-fluoroadenosine-3'-phosphorothioate
  modified_base 3: mod_base = OTHER; note = 2'-O-methyladenosine-3'-phosphate
  modified_base 4: mod_base = OTHER; note = 2'-O-methyluridine-3'-phosphate
  modified_base 5: mod_base = OTHER; note = 2'-O-methylcytidine-3'-phosphate
  modified_base 6: mod_base = OTHER; note = 2'-deoxy-2'-fluorouridine-3'-phosphate
  modified_base 7: mod_base = OTHER; note = 2'-O-methyluridine-3'-phosphate
  modified_base 8: mod_base = OTHER; note = 2'-O-methylguanosine-3'-phosphate
  modified_base 9: mod_base = OTHER; note = 2'-O-methyluridine-3'-phosphate
  modified_base 10: mod_base = OTHER; note = 2'-O-methyluridine-3'-phosphate
  modified_base 11: mod_base = OTHER; note = 2'-O-methyladenosine-3'-phosphate
  modified_base 12: mod_base = OTHER; note = 2'-O-methyladenosine-3'-phosphate
  modified_base 13: mod_base = OTHER; note = 2'-O-methylguanosine-3'-phosphate
  modified_base 14: mod_base = OTHER; note = 2'-deoxy-2'-fluoroadenosine-3'-phosphate
  modified_base 15: mod_base = OTHER; note = 2'-O-methyladenosine-3'-phosphate
  modified_base 16: mod_base = OTHER; note = 2'-deoxy-2'-fluoroguanosine-3'-phosphate
  modified_base 17: mod_base = OTHER; note = 2'-O-methyluridine-3'-phosphate
  modified_base 18: mod_base = OTHER; note = 2'-O-methyluridine-3'-phosphate
  modified_base 19: mod_base = OTHER; note = 2'-O-methylcytidine-3'-phosphate
  modified_base 20: mod_base = OTHER; note = 2'-O-methyladenosine-3'-phosphate
  modified_base 21: mod_base = OTHER; note = 2'-O-methyluridine-3'-phosphorothioate
  modified_base 22: mod_base = OTHER; note = 2'-O-methyluridine-3'-phosphorothioate
  modified_base 23: mod_base = OTHER; note = 2'-O-methylguanosine
taatcttgttaagaagttcattg

SEQ ID NO: 13184 - RNA, 23 nt, synthetic construct
  source 1..23: mol_type = other RNA
  modified_base 1: mod_base = OTHER; note = 2'-O-methyluridine-3'-phosphorothioate 5'-(E)-Vinylphosphonate
  modified_base 2: mod_base = OTHER; note = 2'-deoxy-2'-fluoroguanosine-3'-phosphorothioate
  modified_base 3: mod_base = OTHER; note = 2'-O-methyladenosine-3'-phosphate
  modified_base 4: mod_base = OTHER; note = 2'-O-methylguanosine-3'-phosphate
  modified_base 5: mod_base = OTHER; note = 2'-O-methyladenosine-3'-phosphate
  modified_base 6: mod_base = OTHER; note = 2'-deoxy-2'-fluoroadenosine-3'-phosphate
  modified_base 7: mod_base = OTHER; note = 2'-O-methylcytidine-3'-phosphate
  modified_base 8: mod_base = OTHER; note = 2'-O-methyluridine-3'-phosphate
  modified_base 9: mod_base = OTHER; note = 2'-O-methyluridine-3'-phosphate
  modified_base 10: mod_base = OTHER; note = 2'-O-methyladenosine-3'-phosphate
  modified_base 11: mod_base = OTHER; note = 2'-O-methyladenosine-3'-phosphate
  modified_base 12: mod_base = OTHER; note = 2'-O-methyladenosine-3'-phosphate
  modified_base 13: mod_base = OTHER; note = 2'-O-methyladenosine-3'-phosphate
  modified_base 14: mod_base = OTHER; note = 2'-deoxy-2'-fluorouridine-3'-phosphate
  modified_base 15: mod_base = OTHER; note = 2'-O-methylcytidine-3'-phosphate
  modified_base 16: mod_base = OTHER; note = 2'-deoxy-2'-fluorouridine-3'-phosphate
  modified_base 17: mod_base = OTHER; note = 2'-O-methyluridine-3'-phosphate
  modified_base 18: mod_base = OTHER; note = 2'-O-methylguanosine-3'-phosphate
  modified_base 19: mod_base = OTHER; note = 2'-O-methyluridine-3'-phosphate
  modified_base 20: mod_base = OTHER; note = 2'-O-methyluridine-3'-phosphate
  modified_base 21: mod_base = OTHER; note = 2'-O-methyladenosine-3'-phosphorothioate
  modified_base 22: mod_base = OTHER; note = 2'-O-methyladenosine-3'-phosphorothioate
  modified_base 23: mod_base = OTHER; note = 2'-O-methylguanosine
tgagaacttaaaatcttgttaag

SEQ ID NO: 13185 - RNA, 23 nt, synthetic construct
  source 1..23: mol_type = other RNA
  modified_base 1: mod_base = OTHER; note = 2'-O-methyluridine-3'-phosphorothioate 5'-(E)-Vinylphosphonate
  modified_base 2: mod_base = OTHER; note = 2'-deoxy-2'-fluorocytidine-3'-phosphorothioate
  modified_base 3: mod_base = OTHER; note = 2'-O-methyladenosine-3'-phosphate
  modified_base 4: mod_base = OTHER; note = 2'-O-methylguanosine-3'-phosphate
  modified_base 5: mod_base = OTHER; note = 2'-O-methyladenosine-3'-phosphate
  modified_base 6: mod_base = OTHER; note = 2'-deoxy-2'-fluoroguanosine-3'-phosphate
  modified_base 7: mod_base = OTHER; note = 2'-O-methyladenosine-3'-phosphate
  modified_base 8: mod_base = OTHER; note = 2'-O-methyladenosine-3'-phosphate
  modified_base 9: mod_base = OTHER; note = 2'-O-methylcytidine-3'-phosphate
  modified_base 10: mod_base = OTHER; note = 2'-O-methyluridine-3'-phosphate
  modified_base 11: mod_base = OTHER; note = 2'-O-methyluridine-3'-phosphate
  modified_base 12: mod_base = OTHER; note = 2'-O-methyladenosine-3'-phosphate
  modified_base 13: mod_base = OTHER; note = 2'-O-methyladenosine-3'-phosphate
  modified_base 14: mod_base = OTHER; note = 2'-deoxy-2'-fluoroadenosine-3'-phosphate
  modified_base 15: mod_base = OTHER; note = 2'-O-methyladenosine-3'-phosphate
  modified_base 16: mod_base = OTHER; note = 2'-deoxy-2'-fluorouridine-3'-phosphate
  modified_base 17: mod_base = OTHER; note = 2'-O-methylcytidine-3'-phosphate
  modified_base 18: mod_base = OTHER; note = 2'-O-methyluridine-3'-phosphate
  modified_base 19: mod_base = OTHER; note = 2'-O-methyluridine-3'-phosphate
  modified_base 20: mod_base = OTHER; note = 2'-O-methylguanosine-3'-phosphate
  modified_base 21: mod_base = OTHER; note = 2'-O-methyluridine-3'-phosphorothioate
  modified_base 22: mod_base = OTHER; note = 2'-O-methyluridine-3'-phosphorothioate
  modified_base 23: mod_base = OTHER; note = 2'-O-methyladenosine
tcagagaacttaaaatcttgtta

SEQ ID NO: 13186 - RNA, 23 nt, synthetic construct
  source 1..23: mol_type = other RNA
  modified_base 1: mod_base = OTHER; note = 2'-O-methyluridine-3'-phosphorothioate 5'-(E)-Vinylphosphonate
  modified_base 2: mod_base = OTHER; note = 2'-deoxy-2'-fluoroadenosine-3'-phosphorothioate
  modified_base 3: mod_base = OTHER; note = 2'-O-methyladenosine-3'-phosphate
  modified_base 4: mod_base = OTHER; note = 2'-O-methylcytidine-3'-phosphate
  modified_base 5: mod_base = OTHER; note = 2'-O-methylcytidine-3'-phosphate
  modified_base 6: mod_base = OTHER; note = 2'-deoxy-2'-fluorouridine-3'-phosphate
  modified_base 7: mod_base = OTHER; note = 2'-O-methylcytidine-3'-phosphate
  modified_base 8: mod_base = OTHER; note = 2'-O-methyluridine-3'-phosphate
  modified_base 9: mod_base = OTHER; note = 2'-O-methyluridine-3'-phosphate
  modified_base 10: mod_base = OTHER; note = 2'-O-methyladenosine-3'-phosphate
  modified_base 11: mod_base = OTHER; note = 2'-O-methyluridine-3'-phosphate
  modified_base 12: mod_base = OTHER; note = 2'-O-methyladenosine-3'-phosphate
  modified_base 13: mod_base = OTHER; note = 2'-O-methylcytidine-3'-phosphate
  modified_base 14: mod_base = OTHER; note = 2'-deoxy-2'-fluoroadenosine-3'-phosphate
  modified_base 15: mod_base = OTHER; note = 2'-O-methylguanosine-3'-phosphate
  modified_base 16: mod_base = OTHER; note = 2'-deoxy-2'-fluoroadenosine-3'-phosphate
  modified_base 17: mod_base = OTHER; note = 2'-O-methylguanosine-3'-phosphate
  modified_base 18: mod_base = OTHER; note = 2'-O-methyladenosine-3'-phosphate
  modified_base 19: mod_base = OTHER; note = 2'-O-methyladenosine-3'-phosphate
  modified_base 20: mod_base = OTHER; note = 2'-O-methylcytidine-3'-phosphate
  modified_base 21: mod_base = OTHER; note = 2'-O-methyluridine-3'-phosphorothioate
  modified_base 22: mod_base = OTHER; note = 2'-O-methyluridine-3'-phosphorothioate
  modified_base 23: mod_base = OTHER; note = 2'-O-methyladenosine
taacctcttatacagagaactta

SEQ ID NO: 13187 - RNA, 23 nt, synthetic construct
  source 1..23: mol_type = other RNA
  modified_base 1: mod_base = OTHER; note = 2'-O-methyluridine-3'-phosphorothioate 5'-(E)-Vinylphosphonate
  modified_base 2: mod_base = OTHER; note = 2'-deoxy-2'-fluorouridine-3'-phosphorothioate
  modified_base 3: mod_base = OTHER; note = 2'-O-methylguanosine-3'-phosphate
  modified_base 4: mod_base = OTHER; note = 2'-O-methyladenosine-3'-phosphate
  modified_base 5: mod_base = OTHER; note = 2'-O-methylguanosine-3'-phosphate
  modified_base 6: mod_base = OTHER; note = 2'-deoxy-2'-fluoroguanosine-3'-phosphate
  modified_base 7: mod_base = OTHER; note = 2'-O-methyluridine-3'-phosphate
  modified_base 8: mod_base = OTHER; note = 2'-O-methylguanosine-3'-phosphate
  modified_base 9: mod_base = OTHER; note = 2'-O-methyladenosine-3'-phosphate
  modified_base 10: mod_base = OTHER; note = 2'-O-methyladenosine-3'-phosphate
  modified_base 11: mod_base = OTHER; note = 2'-O-methyladenosine-3'-phosphate
  modified_base 12: mod_base = OTHER; note = 2'-O-methylcytidine-3'-phosphate
  modified_base 13: mod_base = OTHER; note = 2'-O-methylcytidine-3'-phosphate
  modified_base 14: mod_base = OTHER; note = 2'-deoxy-2'-fluorouridine-3'-phosphate
  modified_base 15: mod_base = OTHER; note = 2'-O-methylcytidine-3'-phosphate
  modified_base 16: mod_base = OTHER; note = 2'-deoxy-2'-fluorouridine-3'-phosphate
  modified_base 17: mod_base = OTHER; note = 2'-O-methyluridine-3'-phosphate
  modified_base 18: mod_base = OTHER; note = 2'-O-methyladenosine-3'-phosphate
  modified_base 19: mod_base = OTHER; note = 2'-O-methyluridine-3'-phosphate
  modified_base 20: mod_base = OTHER; note = 2'-O-methyladenosine-3'-phosphate
  modified_base 21: mod_base = OTHER; note = 2'-O-methylcytidine-3'-phosphorothioate
  modified_base 22: mod_base = OTHER; note = 2'-O-methyladenosine-3'-phosphorothioate
  modified_base 23: mod_base = OTHER; note = 2'-O-methylguanosine
ttgaggtgaaacctcttatacag

SEQ ID NO: 13188 - RNA, 23 nt, synthetic construct
  source 1..23: mol_type = other RNA
  modified_base 1: mod_base = OTHER; note = 2'-O-methyluridine-3'-phosphorothioate 5'-(E)-Vinylphosphonate
  modified_base 2: mod_base = OTHER; note = 2'-deoxy-2'-fluoroadenosine-3'-phosphorothioate
  modified_base 3: mod_base = OTHER; note = 2'-O-methyladenosine-3'-phosphate
  modified_base 4: mod_base = OTHER; note = 2'-O-methyluridine-3'-phosphate
  modified_base 5: mod_base = OTHER; note = 2'-O-methyladenosine-3'-phosphate
  modified_base 6: mod_base = OTHER; note = 2'-deoxy-2'-fluorocytidine-3'-phosphate
  modified_base 7: mod_base = OTHER; note = 2'-O-methyluridine-3'-phosphate
  modified_base 8: mod_base = OTHER; note = 2'-O-methylcytidine-3'-phosphate
  modified_base 9: mod_base = OTHER; note = 2'-O-methyluridine-3'-phosphate
  modified_base 10: mod_base = OTHER; note = 2'-O-methyladenosine-3'-phosphate
  modified_base 11: mod_base = OTHER; note = 2'-O-methyluridine-3'-phosphate
  modified_base 12: mod_base = OTHER; note = 2'-O-methyladenosine-3'-phosphate
  modified_base 13: mod_base = OTHER; note = 2'-O-methylguanosine-3'-phosphate
  modified_base 14: mod_base = OTHER; note = 2'-deoxy-2'-fluorouridine-3'-phosphate
  modified_base 15: mod_base = OTHER; note = 2'-O-methylguanosine-3'-phosphate
  modified_base 16: mod_base = OTHER; note = 2'-deoxy-2'-fluorocytidine-3'-phosphate
  modified_base 17: mod_base = OTHER; note = 2'-O-methylcytidine-3'-phosphate
  modified_base 18: mod_base = OTHER; note = 2'-O-methyladenosine-3'-phosphate
  modified_base 19: mod_base = OTHER; note = 2'-O-methyladenosine-3'-phosphate
  modified_base 20: mod_base = OTHER; note = 2'-O-methyladenosine-3'-phosphate
  modified_base 21: mod_base = OTHER; note = 2'-O-methyluridine-3'-phosphorothioate
  modified_base 22: mod_base = OTHER; note = 2'-O-methylguanosine-3'-phosphorothioate
  modified_base 23: mod_base = OTHER; note = 2'-O-methyladenosine
taatactctatagtgccaaatga

SEQ ID NO: 13189 - RNA, 23 nt, synthetic construct
  source 1..23: mol_type = other RNA
  modified_base 1: mod_base = OTHER; note = 2'-O-methyluridine-3'-phosphorothioate 5'-(E)-Vinylphosphonate
  modified_base 2: mod_base = OTHER; note = 2'-deoxy-2'-fluoroadenosine-3'-phosphorothioate
  modified_base 3: mod_base = OTHER; note = 2'-O-methyladenosine-3'-phosphate
  modified_base 4: mod_base = OTHER; note = 2'-O-methyladenosine-3'-phosphate
  modified_base 5: mod_base = OTHER; note = 2'-O-methyluridine-3'-phosphate
  modified_base 6: mod_base = OTHER; note = 2'-deoxy-2'-fluoroadenosine-3'-phosphate
  modified_base 7: mod_base = OTHER; note = 2'-O-methylcytidine-3'-phosphate
  modified_base 8: mod_base = OTHER; note = 2'-O-methyluridine-3'-phosphate
  modified_base 9: mod_base = OTHER; note = 2'-O-methylcytidine-3'-phosphate
  modified_base 10: mod_base = OTHER; note = 2'-O-methyluridine-3'-phosphate
  modified_base 11: mod_base = OTHER; note = 2'-O-methyladenosine-3'-phosphate
  modified_base 12: mod_base = OTHER; note = 2'-O-methyluridine-3'-phosphate
  modified_base 13: mod_base = OTHER; note = 2'-O-methyladenosine-3'-phosphate
  modified_base 14: mod_base = OTHER; note = 2'-deoxy-2'-fluoroguanosine-3'-phosphate
  modified_base 15: mod_base = OTHER; note = 2'-O-methyluridine-3'-phosphate
  modified_base 16: mod_base = OTHER; note = 2'-deoxy-2'-fluoroguanosine-3'-phosphate
  modified_base 17: mod_base = OTHER; note = 2'-O-methylcytidine-3'-phosphate
  modified_base 18: mod_base = OTHER; note = 2'-O-methylcytidine-3'-phosphate
  modified_base 19: mod_base = OTHER; note = 2'-O-methyladenosine-3'-phosphate
  modified_base 20: mod_base = OTHER; note = 2'-O-methyladenosine-3'-phosphate
  modified_base 21: mod_base = OTHER; note = 2'-O-methyladenosine-3'-phosphorothioate
  modified_base 22: mod_base = OTHER; note = 2'-O-methyluridine-3'-phosphorothioate
  modified_base 23: mod_base = OTHER; note = 2'-O-methylguanosine
taaatactctatagtgccaaatg

SEQ ID NO: 13190 - RNA, 23 nt, synthetic construct
  source 1..23: mol_type = other RNA
  modified_base 1: mod_base = OTHER; note = 2'-O-methyluridine-3'-phosphorothioate 5'-(E)-Vinylphosphonate
  modified_base 2: mod_base = OTHER; note = 2'-deoxy-2'-fluorouridine-3'-phosphorothioate
  modified_base 3: mod_base = OTHER; note = 2'-O-methyladenosine-3'-phosphate
  modified_base 4: mod_base = OTHER; note = 2'-O-methyladenosine-3'-phosphate
  modified_base 5: mod_base = OTHER; note = 2'-O-methyladenosine-3'-phosphate
  modified_base 6: mod_base = OTHER; note = 2'-deoxy-2'-fluoroadenosine-3'-phosphate
  modified_base 7: mod_base = OTHER; note = 2'-O-methylguanosine-3'-phosphate
  modified_base 8: mod_base = OTHER; note = 2'-O-methyladenosine-3'-phosphate
  modified_base 9: mod_base = OTHER; note = 2'-O-methyladenosine-3'-phosphate
  modified_base 10: mod_base = OTHER; note = 2'-O-methyladenosine-3'-phosphate
  modified_base 11: mod_base = OTHER; note = 2'-O-methyladenosine-3'-phosphate
  modified_base 12: mod_base = OTHER; note = 2'-O-methyladenosine-3'-phosphate
  modified_base 13: mod_base = OTHER; note = 2'-O-methyluridine-3'-phosphate
  modified_base 14: mod_base = OTHER; note = 2'-deoxy-2'-fluorocytidine-3'-phosphate
  modified_base 15: mod_base = OTHER; note = 2'-O-methyladenosine-3'-phosphate
  modified_base 16: mod_base = OTHER; note = 2'-deoxy-2'-fluorouridine-3'-phosphate
  modified_base 17: mod_base = OTHER; note = 2'-O-methylcytidine-3'-phosphate
  modified_base 18: mod_base = OTHER; note = 2'-O-methyluridine-3'-phosphate
  modified_base 19: mod_base = OTHER; note = 2'-O-methylcytidine-3'-phosphate
  modified_base 20: mod_base = OTHER; note = 2'-O-methyluridine-3'-phosphate
  modified_base 21: mod_base = OTHER; note = 2'-O-methylguanosine-3'-phosphorothioate
  modified_base 22: mod_base = OTHER; note = 2'-O-methylcytidine-3'-phosphorothioate
  modified_base 23: mod_base = OTHER; note = 2'-O-methylcytidine
ttaaaagaaaaatcatctctgcc

SEQ ID NO: 13191 - RNA, 23 nt, synthetic construct
  source 1..23: mol_type = other RNA
  modified_base 1: mod_base = OTHER; note = 2'-O-methyluridine-3'-phosphorothioate 5'-(E)-Vinylphosphonate
  modified_base 2: mod_base = OTHER; note = 2'-deoxy-2'-fluorocytidine-3'-phosphorothioate
  modified_base 3: mod_base = OTHER; note = 2'-O-methyladenosine-3'-phosphate
  modified_base 4: mod_base = OTHER; note = 2'-O-methyladenosine-3'-phosphate
  modified_base 5: mod_base = OTHER; note = 2'-O-methyladenosine-3'-phosphate
  modified_base 6: mod_base = OTHER; note = 2'-deoxy-2'-fluorouridine-3'-phosphate
  modified_base 7: mod_base = OTHER; note = 2'-O-methyladenosine-3'-phosphate
  modified_base 8: mod_base = OTHER; note = 2'-O-methylcytidine-3'-phosphate
  modified_base 9: mod_base = OTHER; note = 2'-O-methyluridine-3'-phosphate
  modified_base 10: mod_base = OTHER; note = 2'-O-methylcytidine-3'-phosphate
  modified_base 11: mod_base = OTHER; note = 2'-O-methyluridine-3'-phosphate
  modified_base 12: mod_base = OTHER; note = 2'-O-methyladenosine-3'-phosphate
  modified_base 13: mod_base = OTHER; note = 2'-O-methyluridine-3'-phosphate
  modified_base 14: mod_base = OTHER; note = 2'-deoxy-2'-fluoroadenosine-3'-phosphate
  modified_base 15: mod_base = OTHER; note = 2'-O-methylguanosine-3'-phosphate
  modified_base 16: mod_base = OTHER; note = 2'-deoxy-2'-fluorouridine-3'-phosphate
  modified_base 17: mod_base = OTHER; note = 2'-O-methylguanosine-3'-phosphate
  modified_base 18: mod_base = OTHER; note = 2'-O-methylcytidine-3'-phosphate
  modified_base 19: mod_base = OTHER; note = 2'-O-methylcytidine-3'-phosphate
  modified_base 20: mod_base = OTHER; note = 2'-O-methyladenosine-3'-phosphate
  modified_base 21: mod_base = OTHER; note = 2'-O-methyladenosine-3'-phosphorothioate
  modified_base 22: mod_base = OTHER; note = 2'-O-methyladenosine-3'-phosphorothioate
  modified_base 23: mod_base = OTHER; note = 2'-O-methyluridine
tcaaatactctatagtgccaaat

SEQ ID NO: 13192 - RNA, 23 nt, synthetic construct
  source 1..23: mol_type = other RNA
  modified_base 1: mod_base = OTHER; note = 2'-O-methyluridine-3'-phosphorothioate 5'-(E)-Vinylphosphonate
  modified_base 2: mod_base = OTHER; note = 2'-deoxy-2'-fluoroadenosine-3'-phosphorothioate
  modified_base 3: mod_base = OTHER; note = 2'-O-methylcytidine-3'-phosphate
  modified_base 4: mod_base = OTHER; note = 2'-O-methyladenosine-3'-phosphate
  modified_base 5: mod_base = OTHER; note = 2'-O-methyladenosine-3'-phosphate
  modified_base 6: mod_base = OTHER; note = 2'-deoxy-2'-fluoroadenosine-3'-phosphate
  modified_base 7: mod_base = OTHER; note = 2'-O-methyluridine-3'-phosphate
  modified_base 8: mod_base = OTHER; note = 2'-O-methyladenosine-3'-phosphate
  modified_base 9: mod_base = OTHER; note = 2'-O-methylcytidine-3'-phosphate
  modified_base 10: mod_base = OTHER; note = 2'-O-methyluridine-3'-phosphate
  modified_base 11: mod_base = OTHER; note = 2'-O-methylcytidine-3'-phosphate
  modified_base 12: mod_base = OTHER; note = 2'-O-methyluridine-3'-phosphate
  modified_base 13: mod_base = OTHER; note = 2'-O-methyladenosine-3'-phosphate
  modified_base 14: mod_base = OTHER; note = 2'-deoxy-2'-fluorouridine-3'-phosphate
  modified_base 15: mod_base = OTHER; note = 2'-O-methyladenosine-3'-phosphate
  modified_base 16: mod_base = OTHER; note = 2'-deoxy-2'-fluoroguanosine-3'-phosphate
  modified_base 17: mod_base = OTHER; note = 2'-O-methyluridine-3'-phosphate
  modified_base 18: mod_base = OTHER; note = 2'-O-methylguanosine-3'-phosphate
  modified_base 19: mod_base = OTHER; note = 2'-O-methylcytidine-3'-phosphate
  modified_base 20: mod_base = OTHER; note = 2'-O-methylcytidine-3'-phosphate
  modified_base 21: mod_base = OTHER; note = 2'-O-methyladenosine-3'-phosphorothioate
  modified_base 22: mod_base = OTHER; note = 2'-O-methyladenosine-3'-phosphorothioate
  modified_base 23: mod_base = OTHER; note = 2'-O-methyladenosine
tacaaatactctatagtgccaaa

SEQ ID NO: 13193 - RNA, 23 nt, synthetic construct
  source 1..23: mol_type = other RNA
  modified_base 1: mod_base = OTHER; note = 2'-O-methyluridine-3'-phosphorothioate 5'-(E)-Vinylphosphonate
  modified_base 2: mod_base = OTHER; note = 2'-deoxy-2'-fluoroadenosine-3'-phosphorothioate
  modified_base 3: mod_base = OTHER; note = 2'-O-methyladenosine-3'-phosphate
  modified_base 4: mod_base = OTHER; note = 2'-O-methylcytidine-3'-phosphate
  modified_base 5: mod_base = OTHER; note = 2'-O-methyladenosine-3'-phosphate
  modified_base 6: mod_base = OTHER; note = 2'-deoxy-2'-fluoroadenosine-3'-phosphate
  modified_base 7: mod_base = OTHER; note = 2'-O-methyladenosine-3'-phosphate
  modified_base 8: mod_base = OTHER; note = 2'-O-methyluridine-3'-phosphate
  modified_base 9: mod_base = OTHER; note = 2'-O-methyladenosine-3'-phosphate
  modified_base 10: mod_base = OTHER; note = 2'-O-methylcytidine-3'-phosphate
  modified_base 11: mod_base = OTHER; note = 2'-O-methyluridine-3'-phosphate
  modified_base 12: mod_base = OTHER; note = 2'-O-methylcytidine-3'-phosphate
  modified_base 13: mod_base = OTHER; note = 2'-O-methyluridine-3'-phosphate
  modified_base 14: mod_base = OTHER; note = 2'-deoxy-2'-fluoroadenosine-3'-phosphate
  modified_base 15: mod_base = OTHER; note = 2'-O-methyluridine-3'-phosphate
  modified_base 16: mod_base = OTHER; note = 2'-deoxy-2'-fluoroadenosine-3'-phosphate
  modified_base 17: mod_base = OTHER; note = 2'-O-methylguanosine-3'-phosphate
  modified_base 18: mod_base = OTHER; note = 2'-O-methyluridine-3'-phosphate
  modified_base 19: mod_base = OTHER; note = 2'-O-methylguanosine-3'-phosphate
  modified_base 20: mod_base = OTHER; note = 2'-O-methylcytidine-3'-phosphate
  modified_base 21: mod_base = OTHER; note = 2'-O-methylcytidine-3'-phosphorothioate
  modified_base 22: mod_base = OTHER; note = 2'-O-methyladenosine-3'-phosphorothioate
  modified_base 23: mod_base = OTHER; note = 2'-O-methyladenosine
taacaaatactctatagtgccaa

SEQ ID NO: 13194 - RNA, 23 nt, synthetic construct
  source 1..23: mol_type = other RNA
  modified_base 1: mod_base = OTHER; note = 2'-O-methyluridine-3'-phosphorothioate 5'-(E)-Vinylphosphonate
  modified_base 2: mod_base = OTHER; note = 2'-deoxy-2'-fluorouridine-3'-phosphorothioate
  modified_base 3: mod_base = OTHER; note = 2'-O-methyladenosine-3'-phosphate
  modified_base 4: mod_base = OTHER; note = 2'-O-methyladenosine-3'-phosphate
  modified_base 5: mod_base = OTHER; note = 2'-O-methylcytidine-3'-phosphate
  modified_base 6: mod_base = OTHER; note = 2'-deoxy-2'-fluoroadenosine-3'-phosphate
  modified_base 7: mod_base = OTHER; note = 2'-O-methyladenosine-3'-phosphate
  modified_base 8: mod_base = OTHER; note = 2'-O-methyladenosine-3'-phosphate
  modified_base 9: mod_base = OTHER; note = 2'-O-methyluridine-3'-phosphate
  modified_base 10: mod_base = OTHER; note = 2'-O-methyladenosine-3'-phosphate
  modified_base 11: mod_base = OTHER; note = 2'-O-methylcytidine-3'-phosphate
  modified_base 12: mod_base = OTHER; note = 2'-O-methyluridine-3'-phosphate
  modified_base 13: mod_base = OTHER; note = 2'-O-methylcytidine-3'-phosphate
  modified_base 14: mod_base = OTHER; note = 2'-deoxy-2'-fluorouridine-3'-phosphate
  modified_base 15: mod_base = OTHER; note = 2'-O-methyladenosine-3'-phosphate
  modified_base 16: mod_base = OTHER; note = 2'-deoxy-2'-fluorouridine-3'-phosphate
  modified_base 17: mod_base = OTHER; note = 2'-O-methyladenosine-3'-phosphate
  modified_base 18: mod_base = OTHER; note = 2'-O-methylguanosine-3'-phosphate
  modified_base 19: mod_base = OTHER; note = 2'-O-methyluridine-3'-phosphate
  modified_base 20: mod_base = OTHER; note = 2'-O-methylguanosine-3'-phosphate
  modified_base 21: mod_base = OTHER; note = 2'-O-methylcytidine-3'-phosphorothioate
  modified_base 22: mod_base = OTHER; note = 2'-O-methylcytidine-3'-phosphorothioate
  modified_base 23: mod_base = OTHER; note = 2'-O-methyladenosine
ttaacaaatactctatagtgcca

SEQ ID NO: 13195 - RNA, 23 nt, synthetic construct
  source 1..23: mol_type = other RNA
  modified_base 1: mod_base = OTHER; note = 2'-O-methyluridine-3'-phosphorothioate 5'-(E)-Vinylphosphonate
  modified_base 2: mod_base = OTHER; note = 2'-deoxy-2'-fluorouridine-3'-phosphorothioate
  modified_base 3: mod_base = OTHER; note = 2'-O-methyluridine-3'-phosphate
  modified_base 4: mod_base = OTHER; note = 2'-O-methyladenosine-3'-phosphate
  modified_base 5: mod_base = OTHER; note = 2'-O-methyladenosine-3'-phosphate
  modified_base 6: mod_base = OTHER; note = 2'-deoxy-2'-fluorocytidine-3'-phosphate
  modified_base 7: mod_base = OTHER; note = 2'-O-methyladenosine-3'-phosphate
  modified_base 8: mod_base = OTHER; note = 2'-O-methyladenosine-3'-phosphate
  modified_base 9: mod_base = OTHER; note = 2'-O-methyladenosine-3'-phosphate
  modified_base 10: mod_base = OTHER; note = 2'-O-methyluridine-3'-phosphate
  modified_base 11: mod_base = OTHER; note = 2'-O-methyladenosine-3'-phosphate
  modified_base 12: mod_base = OTHER; note = 2'-O-methylcytidine-3'-phosphate
  modified_base 13: mod_base = OTHER; note = 2'-O-methyluridine-3'-phosphate
  modified_base 14: mod_base = OTHER; note = 2'-deoxy-2'-fluorocytidine-3'-phosphate
  modified_base 15: mod_base = OTHER; note = 2'-O-methyluridine-3'-phosphate
  modified_base 16: mod_base = OTHER; note = 2'-deoxy-2'-fluoroadenosine-3'-phosphate
  modified_base 17: mod_base = OTHER; note = 2'-O-methyluridine-3'-phosphate
  modified_base 18: mod_base = OTHER; note = 2'-O-methyladenosine-3'-phosphate
  modified_base 19: mod_base = OTHER; note = 2'-O-methylguanosine-3'-phosphate
  modified_base 20: mod_base = OTHER; note = 2'-O-methyluridine-3'-phosphate
  modified_base 21: mod_base = OTHER; note = 2'-O-methylguanosine-3'-phosphorothioate
  modified_base 22: mod_base = OTHER; note = 2'-O-methylcytidine-3'-phosphorothioate
  modified_base 23: mod_base = OTHER; note = 2'-O-methylcytidine
tttaacaaatactctatagtgcc

SEQ ID NO: 13196 - RNA, 23 nt, synthetic construct
  source 1..23: mol_type = other RNA
  modified_base 1: mod_base = OTHER; note = 2'-O-methyluridine-3'-phosphorothioate 5'-(E)-Vinylphosphonate
  modified_base 2: mod_base = OTHER; note = 2'-deoxy-2'-fluoroadenosine-3'-phosphorothioate
  modified_base 3: mod_base = OTHER; note = 2'-O-methyluridine-3'-phosphate
  modified_base 4: mod_base = OTHER; note = 2'-O-methyluridine-3'-phosphate
  modified_base 5: mod_base = OTHER; note = 2'-O-methyladenosine-3'-phosphate
  modified_base 6: mod_base = OTHER; note = 2'-deoxy-2'-fluoroadenosine-3'-phosphate
  modified_base 7: mod_base = OTHER; note = 2'-O-methylcytidine-3'-phosphate
  modified_base 8: mod_base = OTHER; note = 2'-O-methyladenosine-3'-phosphate
  modified_base 9: mod_base = OTHER; note = 2'-O-methyladenosine-3'-phosphate
  modified_base 10: mod_base = OTHER; note = 2'-O-methyladenosine-3'-phosphate
  modified_base 11: mod_base = OTHER; note = 2'-O-methyluridine-3'-phosphate
  modified_base 12: mod_base = OTHER; note = 2'-O-methyladenosine-3'-phosphate
  modified_base 13: mod_base = OTHER; note = 2'-O-methylcytidine-3'-phosphate
  modified_base 14: mod_base = OTHER; note = 2'-deoxy-2'-fluorouridine-3'-phosphate
  modified_base 15: mod_base = OTHER; note = 2'-O-methylcytidine-3'-phosphate
  modified_base 16: mod_base = OTHER; note = 2'-deoxy-2'-fluorouridine-3'-phosphate
  modified_base 17: mod_base = OTHER; note = 2'-O-methyladenosine-3'-phosphate
  modified_base 18: mod_base = OTHER; note = 2'-O-methyluridine-3'-phosphate
  modified_base 19: mod_base = OTHER; note = 2'-O-methyladenosine-3'-phosphate
  modified_base 20: mod_base = OTHER; note = 2'-O-methylguanosine-3'-phosphate
  modified_base 21: mod_base = OTHER; note = 2'-O-methyluridine-3'-phosphorothioate
  modified_base 22: mod_base = OTHER; note = 2'-O-methylguanosine-3'-phosphorothioate
  modified_base 23: mod_base = OTHER; note = 2'-O-methylcytidine
tattaacaaatactctatagtgc

SEQ ID NO: 13197 - RNA, 23 nt, synthetic construct
  source 1..23: mol_type = other RNA
  modified_base 1: mod_base = OTHER; note = 2'-O-methyluridine-3'-phosphorothioate 5'-(E)-Vinylphosphonate
  modified_base 2: mod_base = OTHER; note = 2'-deoxy-2'-fluorocytidine-3'-phosphorothioate
  modified_base 3: mod_base = OTHER; note = 2'-O-methyladenosine-3'-phosphate
  modified_base 4: mod_base = OTHER; note = 2'-O-methyluridine-3'-phosphate
  modified_base 5: mod_base = OTHER; note = 2'-O-methyluridine-3'-phosphate
  modified_base 6: mod_base = OTHER; note = 2'-deoxy-2'-fluoroadenosine-3'-phosphate
  modified_base 7: mod_base = OTHER; note = 2'-O-methyladenosine-3'-phosphate
  modified_base 8: mod_base = OTHER; note = 2'-O-methylcytidine-3'-phosphate
  modified_base 9: mod_base = OTHER; note = 2'-O-methyladenosine-3'-phosphate
  modified_base 10: mod_base = OTHER; note = 2'-O-methyladenosine-3'-phosphate
  modified_base 11: mod_base = OTHER; note = 2'-O-methyladenosine-3'-phosphate
  modified_base 12: mod_base = OTHER; note = 2'-O-methyluridine-3'-phosphate
  modified_base 13: mod_base = OTHER; note = 2'-O-methyladenosine-3'-phosphate
  modified_base 14: mod_base = OTHER; note = 2'-deoxy-2'-fluorocytidine-3'-phosphate
  modified_base 15: mod_base = OTHER; note = 2'-O-methyluridine-3'-phosphate
  modified_base 16: mod_base = OTHER; note = 2'-deoxy-2'-fluorocytidine-3'-phosphate
  modified_base 17: mod_base = OTHER; note = 2'-O-methyluridine-3'-phosphate
  modified_base 18: mod_base = OTHER; note = 2'-O-methyladenosine-3'-phosphate
  modified_base 19: mod_base = OTHER; note = 2'-O-methyluridine-3'-phosphate
  modified_base 20: mod_base = OTHER; note = 2'-O-methyladenosine-3'-phosphate
  modified_base 21: mod_base = OTHER; note = 2'-O-methylguanosine-3'-phosphorothioate
  modified_base 22: mod_base = OTHER; note = 2'-O-methyluridine-3'-phosphorothioate
  modified_base 23: mod_base = OTHER; note = 2'-O-methylguanosine
tcattaacaaatactctatagtg

SEQ ID NO: 13198 - RNA, 23 nt, synthetic construct
  source 1..23: mol_type = other RNA
  modified_base 1: mod_base = OTHER; note = 2'-O-methyluridine-3'-phosphorothioate 5'-(E)-Vinylphosphonate
  modified_base 2: mod_base = OTHER; note = 2'-deoxy-2'-fluorocytidine-3'-phosphorothioate
  modified_base 3: mod_base = OTHER; note = 2'-O-methylcytidine-3'-phosphate
  modified_base 4: mod_base = OTHER; note = 2'-O-methyladenosine-3'-phosphate
  modified_base 5: mod_base = OTHER; note = 2'-O-methyluridine-3'-phosphate
  modified_base 6: mod_base = OTHER; note = 2'-deoxy-2'-fluorouridine-3'-phosphate
  modified_base 7: mod_base = OTHER; note = 2'-O-methyladenosine-3'-phosphate
  modified_base 8: mod_base = OTHER; note = 2'-O-methyladenosine-3'-phosphate
  modified_base 9: mod_base = OTHER; note = 2'-O-methylcytidine-3'-phosphate
  modified_base 10: mod_base = OTHER; note = 2'-O-methyladenosine-3'-phosphate
  modified_base 11: mod_base = OTHER; note = 2'-O-methyladenosine-3'-phosphate
  modified_base 12: mod_base = OTHER; note = 2'-O-methyladenosine-3'-phosphate
  modified_base 13: mod_base = OTHER; note = 2'-O-methyluridine-3'-phosphate
  modified_base 14: mod_base = OTHER; note = 2'-deoxy-2'-fluoroadenosine-3'-phosphate
  modified_base 15: mod_base = OTHER; note = 2'-O-methylcytidine-3'-phosphate
  modified_base 16: mod_base = OTHER; note = 2'-deoxy-2'-fluorouridine-3'-phosphate
  modified_base 17: mod_base = OTHER; note = 2'-O-methylcytidine-3'-phosphate
  modified_base 18: mod_base = OTHER; note = 2'-O-methyluridine-3'-phosphate
  modified_base 19: mod_base = OTHER; note = 2'-O-methyladenosine-3'-phosphate
  modified_base 20: mod_base = OTHER; note = 2'-O-methyluridine-3'-phosphate
  modified_base 21: mod_base = OTHER; note = 2'-O-methyladenosine-3'-phosphorothioate
  modified_base 22: mod_base = OTHER; note = 2'-O-methylguanosine-3'-phosphorothioate
  modified_base 23: mod_base = OTHER; note = 2'-O-methyluridine
tccattaacaaatactctatagt

SEQ ID NO: 13199 - RNA, 23 nt, synthetic construct
  source 1..23: mol_type = other RNA
  modified_base 1: mod_base = OTHER; note = 2'-O-methyluridine-3'-phosphorothioate 5'-(E)-Vinylphosphonate
  modified_base 2: mod_base = OTHER; note = 2'-deoxy-2'-fluoroguanosine-3'-phosphorothioate
  modified_base 3: mod_base = OTHER; note = 2'-O-methylcytidine-3'-phosphate
  modified_base 4: mod_base = OTHER; note = 2'-O-methylcytidine-3'-phosphate
  modified_base 5: mod_base = OTHER; note = 2'-O-methyladenosine-3'-phosphate
  modified_base 6: mod_base = OTHER; note = 2'-deoxy-2'-fluorouridine-3'-phosphate
  modified_base 7: mod_base = OTHER; note = 2'-O-methyluridine-3'-phosphate
  modified_base 8: mod_base = OTHER; note = 2'-O-methyladenosine-3'-phosphate
  modified_base 9: mod_base = OTHER; note = 2'-O-methyladenosine-3'-phosphate
  modified_base 10: mod_base = OTHER; note = 2'-O-methylcytidine-3'-phosphate
  modified_base 11: mod_base = OTHER; note = 2'-O-methyladenosine-3'-phosphate
  modified_base 12: mod_base = OTHER; note = 2'-O-methyladenosine-3'-phosphate
  modified_base 13: mod_base = OTHER; note = 2'-O-methyladenosine-3'-phosphate
  modified_base 14: mod_base = OTHER; note = 2'-deoxy-2'-fluorouridine-3'-phosphate
  modified_base 15: mod_base = OTHER; note = 2'-O-methyladenosine-3'-phosphate
  modified_base 16: mod_base = OTHER; note = 2'-deoxy-2'-fluorocytidine-3'-phosphate
  modified_base 17: mod_base = OTHER; note = 2'-O-methyluridine-3'-phosphate
  modified_base 18: mod_base = OTHER; note = 2'-O-methylcytidine-3'-phosphate
  modified_base 19: mod_base = OTHER; note = 2'-O-methyluridine-3'-phosphate
  modified_base 20: mod_base = OTHER; note = 2'-O-methyladenosine-3'-phosphate
  modified_base 21: mod_base = OTHER; note = 2'-O-methyluridine-3'-phosphorothioate
  modified_base 22: mod_base = OTHER; note = 2'-O-methyladenosine-3'-phosphorothioate
  modified_base 23: mod_base = OTHER; note = 2'-O-methylguanosine
tgccattaacaaatactctatag

SEQ ID NO: 13200 - RNA, 23 nt, synthetic construct
  source 1..23: mol_type = other RNA
  modified_base 1: mod_base = OTHER; note = 2'-O-methyluridine-3'-phosphorothioate 5'-(E)-Vinylphosphonate
  modified_base 2: mod_base = OTHER; note = 2'-deoxy-2'-fluorouridine-3'-phosphorothioate
  modified_base 3: mod_base = OTHER; note = 2'-O-methylguanosine-3'-phosphate
  modified_base 4: mod_base = OTHER; note = 2'-O-methylcytidine-3'-phosphate
  modified_base 5: mod_base = OTHER; note = 2'-O-methylcytidine-3'-phosphate
  modified_base 6: mod_base = OTHER; note = 2'-deoxy-2'-fluoroadenosine-3'-phosphate
  modified_base 7: mod_base = OTHER; note = 2'-O-methyluridine-3'-phosphate
  modified_base 8: mod_base = OTHER; note = 2'-O-methyluridine-3'-phosphate
  modified_base 9: mod_base = OTHER; note = 2'-O-methyladenosine-3'-phosphate
  modified_base 10: mod_base = OTHER; note = 2'-O-methyladenosine-3'-phosphate
  modified_base 11: mod_base = OTHER; note = 2'-O-methylcytidine-3'-phosphate
  modified_base 12: mod_base = OTHER; note = 2'-O-methyladenosine-3'-phosphate
  modified_base 13: mod_base = OTHER; note = 2'-O-methyladenosine-3'-phosphate
  modified_base 14: mod_base = OTHER; note = 2'-deoxy-2'-fluoroadenosine-3'-phosphate
  modified_base 15: mod_base = OTHER; note = 2'-O-methyluridine-3'-phosphate
  modified_base 16: mod_base = OTHER; note = 2'-deoxy-2'-fluoroadenosine-3'-phosphate
  modified_base 17: mod_base = OTHER; note = 2'-O-methylcytidine-3'-phosphate
  modified_base 18: mod_base = OTHER; note = 2'-O-methyluridine-3'-phosphate
  modified_base 19: mod_base = OTHER; note = 2'-O-methylcytidine-3'-phosphate
  modified_base 20: mod_base = OTHER; note = 2'-O-methyluridine-3'-phosphate
  modified_base 21: mod_base = OTHER; note = 2'-O-methyladenosine-3'-phosphorothioate
  modified_base 22: mod_base = OTHER; note = 2'-O-methyluridine-3'-phosphorothioate
  modified_base 23: mod_base = OTHER; note = 2'-O-methyladenosine
ttgccattaacaaatactctata

SEQ ID NO: 13201 - RNA, 23 nt, synthetic construct
  source 1..23: mol_type = other RNA
  modified_base 1: mod_base = OTHER; note = 2'-O-methyluridine-3'-phosphorothioate 5'-(E)-Vinylphosphonate
  modified_base 2: mod_base = OTHER; note = 2'-deoxy-2'-fluorocytidine-3'-phosphorothioate
  modified_base 3: mod_base = OTHER; note = 2'-O-methyluridine-3'-phosphate
  modified_base 4: mod_base = OTHER; note = 2'-O-methylguanosine-3'-phosphate
  modified_base 5: mod_base = OTHER; note = 2'-O-methylcytidine-3'-phosphate
  modified_base 6: mod_base = OTHER; note = 2'-deoxy-2'-fluorocytidine-3'-phosphate
  modified_base 7: mod_base = OTHER; note = 2'-O-methyladenosine-3'-phosphate
  modified_base 8: mod_base = OTHER; note = 2'-O-methyluridine-3'-phosphate
  modified_base 9: mod_base = OTHER; note = 2'-O-methyluridine-3'-phosphate
  modified_base 10: mod_base = OTHER; note = 2'-O-methyladenosine-3'-phosphate
  modified_base 11: mod_base = OTHER; note = 2'-O-methyladenosine-3'-phosphate
  modified_base 12: mod_base = OTHER; note = 2'-O-methylcytidine-3'-phosphate
  modified_base 13: mod_base = OTHER; note = 2'-O-methyladenosine-3'-phosphate
  modified_base 14: mod_base = OTHER; note = 2'-deoxy-2'-fluoroadenosine-3'-phosphate
  modified_base 15: mod_base = OTHER; note = 2'-O-methyladenosine-3'-phosphate
  modified_base 16: mod_base = OTHER; note = 2'-deoxy-2'-fluorouridine-3'-phosphate
  modified_base 17: mod_base = OTHER; note = 2'-O-methyladenosine-3'-phosphate
  modified_base 18: mod_base = OTHER; note = 2'-O-methylcytidine-3'-phosphate
  modified_base 19: mod_base = OTHER; note = 2'-O-methyluridine-3'-phosphate
  modified_base 20: mod_base = OTHER; note = 2'-O-methylcytidine-3'-phosphate
  modified_base 21: mod_base = OTHER; note = 2'-O-methyluridine-3'-phosphorothioate
  modified_base 22: mod_base = OTHER; note = 2'-O-methyladenosine-3'-phosphorothioate
  modified_base 23: mod_base = OTHER; note = 2'-O-methyluridine
tctgccattaacaaatactctat

SEQ ID NO: 13202 - RNA, 23 nt, synthetic construct
  source 1..23: mol_type = other RNA
  modified_base 1: mod_base = OTHER; note = 2'-O-methyluridine-3'-phosphorothioate 5'-(E)-Vinylphosphonate
  modified_base 2: mod_base = OTHER; note = 2'-deoxy-2'-fluorouridine-3'-phosphorothioate
  modified_base 3: mod_base = OTHER; note = 2'-O-methylcytidine-3'-phosphate
  modified_base 4: mod_base = OTHER; note = 2'-O-methyluridine-3'-phosphate
  modified_base 5: mod_base = OTHER; note = 2'-O-methylguanosine-3'-phosphate
  modified_base 6: mod_base = OTHER; note = 2'-deoxy-2'-fluorocytidine-3'-phosphate
  modified_base 7: mod_base = OTHER; note = 2'-O-methylcytidine-3'-phosphate
  modified_base 8: mod_base = OTHER; note = 2'-O-methyladenosine-3'-phosphate
  modified_base 9: mod_base = OTHER; note = 2'-O-methyluridine-3'-phosphate
  modified_base 10: mod_base = OTHER; note = 2'-O-methyluridine-3'-phosphate
  modified_base 11: mod_base = OTHER; note = 2'-O-methyladenosine-3'-phosphate
  modified_base 12: mod_base = OTHER; note = 2'-O-methyladenosine-3'-phosphate
  modified_base 13: mod_base = OTHER; note = 2'-O-methylcytidine-3'-phosphate
  modified_base 14: mod_base = OTHER; note = 2'-deoxy-2'-fluoroadenosine-3'-phosphate
  modified_base 15: mod_base = OTHER; note = 2'-O-methyladenosine-3'-phosphate
  modified_base 16: mod_base = OTHER; note = 2'-deoxy-2'-fluoroadenosine-3'-phosphate
  modified_base 17: mod_base = OTHER; note = 2'-O-methyluridine-3'-phosphate
  modified_base 18: mod_base = OTHER; note = 2'-O-methyladenosine-3'-phosphate
  modified_base 19: mod_base = OTHER; note = 2'-O-methylcytidine-3'-phosphate
  modified_base 20: mod_base = OTHER; note = 2'-O-methyluridine-3'-phosphate
  modified_base 21: mod_base = OTHER; note = 2'-O-methylcytidine-3'-phosphorothioate
  modified_base 22: mod_base = OTHER; note = 2'-O-methyluridine-3'-phosphorothioate
  modified_base 23: mod_base = OTHER; note = 2'-O-methyladenosine
ttctgccattaacaaatactcta

SEQ ID NO: 13203 - RNA, 23 nt, synthetic construct
  source 1..23: mol_type = other RNA
  modified_base 1: mod_base = OTHER; note = 2'-O-methyluridine-3'-phosphorothioate 5'-(E)-Vinylphosphonate
  modified_base 2: mod_base = OTHER; note = 2'-deoxy-2'-fluoroadenosine-3'-phosphorothioate
  modified_base 3: mod_base = OTHER; note = 2'-O-methyladenosine-3'-phosphate
  modified_base 4: mod_base = OTHER; note = 2'-O-methyladenosine-3'-phosphate
  modified_base 5: mod_base = OTHER; note = 2'-O-methyladenosine-3'-phosphate
  modified_base 6: mod_base = OTHER; note = 2'-deoxy-2'-fluoroguanosine-3'-phosphate
  modified_base 7: mod_base = OTHER; note = 2'-O-methyladenosine-3'-phosphate
  modified_base 8: mod_base = OTHER; note = 2'-O-methyladenosine-3'-phosphate
  modified_base 9: mod_base = OTHER; note = 2'-O-methyladenosine-3'-phosphate
  modified_base 10: mod_base = OTHER; note = 2'-O-methyladenosine-3'-phosphate
  modified_base 11: mod_base = OTHER; note = 2'-O-methyladenosine-3'-phosphate
  modified_base 12: mod_base = OTHER; note = 2'-O-methyluridine-3'-phosphate
  modified_base 13: mod_base = OTHER; note = 2'-O-methylcytidine-3'-phosphate
  modified_base 14: mod_base = OTHER; note = 2'-deoxy-2'-fluoroadenosine-3'-phosphate
  modified_base 15: mod_base = OTHER; note = 2'-O-methyluridine-3'-phosphate
  modified_base 16: mod_base = OTHER; note = 2'-deoxy-2'-fluorocytidine-3'-phosphate
  modified_base 17: mod_base = OTHER; note = 2'-O-methyluridine-3'-phosphate
  modified_base 18: mod_base = OTHER; note = 2'-O-methylcytidine-3'-phosphate
  modified_base 19: mod_base = OTHER; note = 2'-O-methyluridine-3'-phosphate
  modified_base 20: mod_base = OTHER; note = 2'-O-methylguanosine-3'-phosphate
  modified_base 21: mod_base = OTHER; note = 2'-O-methylcytidine-3'-phosphorothioate
  modified_base 22: mod_base = OTHER; note = 2'-O-methylcytidine-3'-phosphorothioate
  modified_base 23: mod_base = OTHER; note = 2'-O-methyladenosine
taaaagaaaaatcatctctgcca

SEQ ID NO: 13204 - RNA, 23 nt, synthetic construct
  source 1..23: mol_type = other RNA
  modified_base 1: mod_base = OTHER; note = 2'-O-methyluridine-3'-phosphorothioate 5'-(E)-Vinylphosphonate
  modified_base 2: mod_base = OTHER; note = 2'-deoxy-2'-fluorouridine-3'-phosphorothioate
  modified_base 3: mod_base = OTHER; note = 2'-O-methyluridine-3'-phosphate
  modified_base 4: mod_base = OTHER; note = 2'-O-methyladenosine-3'-phosphate
  modified_base 5: mod_base = OTHER; note = 2'-O-methyladenosine-3'-phosphate
  modified_base 6: mod_base = OTHER; note = 2'-deoxy-2'-fluoroadenosine-3'-phosphate
  modified_base 7: mod_base = OTHER; note = 2'-O-methyladenosine-3'-phosphate
  modified_base 8: mod_base = OTHER; note = 2'-O-methylguanosine-3'-phosphate
  modified_base 9: mod_base = OTHER; note = 2'-O-methyladenosine-3'-phosphate
  modified_base 10: mod_base = OTHER; note = 2'-O-methyladenosine-3'-phosphate
  modified_base 11: mod_base = OTHER; note = 2'-O-methyladenosine-3'-phosphate
  modified_base 12: mod_base = OTHER; note = 2'-O-methyladenosine-3'-phosphate
  modified_base 13: mod_base = OTHER; note = 2'-O-methyladenosine-3'-phosphate
  modified_base 14: mod_base = OTHER; note = 2'-deoxy-2'-fluorouridine-3'-phosphate
  modified_base 15: mod_base = OTHER; note = 2'-O-methylcytidine-3'-phosphate
  modified_base 16: mod_base = OTHER; note = 2'-deoxy-2'-fluoroadenosine-3'-phosphate
  modified_base 17: mod_base = OTHER; note = 2'-O-methyluridine-3'-phosphate
  modified_base 18: mod_base = OTHER; note = 2'-O-methylcytidine-3'-phosphate
  modified_base 19: mod_base = OTHER; note = 2'-O-methyluridine-3'-phosphate
  modified_base 20: mod_base = OTHER; note = 2'-O-methylcytidine-3'-phosphate
  modified_base 21: mod_base = OTHER; note = 2'-O-methyluridine-3'-phosphorothioate
  modified_base 22: mod_base = OTHER; note = 2'-O-methylguanosine-3'-phosphorothioate
  modified_base 23: mod_base = OTHER; note = 2'-O-methylcytidine
tttaaaagaaaaatcatctctgc

SEQ ID NO: 13205 - RNA, 23 nt, synthetic construct
  source 1..23: mol_type = other RNA
  modified_base 1: mod_base = OTHER; note = 2'-O-methyluridine-3'-phosphorothioate 5'-(E)-Vinylphosphonate
  modified_base 2: mod_base = OTHER; note = 2'-deoxy-2'-fluoroadenosine-3'-phosphorothioate
  modified_base 3: mod_base = OTHER; note = 2'-O-methyluridine-3'-phosphate
  modified_base 4: mod_base = OTHER; note = 2'-O-methyladenosine-3'-phosphate
  modified_base 5: mod_base = OTHER; note = 2'-O-methylcytidine-3'-phosphate
  modified_base 6: mod_base = OTHER; note = 2'-deoxy-2'-fluoroadenosine-3'-phosphate
  modified_base 7: mod_base = OTHER; note = 2'-O-methyladenosine-3'-phosphate
  modified_base 8: mod_base = OTHER; note = 2'-O-methyladenosine-3'-phosphate
  modified_base 9: mod_base = OTHER; note = 2'-O-methyluridine-3'-phosphate
  modified_base 10: mod_base = OTHER; note = 2'-O-methyladenosine-3'-phosphate
  modified_base 11: mod_base = OTHER; note = 2'-O-methyladenosine-3'-phosphate
  modified_base 12: mod_base = OTHER; note = 2'-O-methylcytidine-3'-phosphate
  modified_base 13: mod_base = OTHER; note = 2'-O-methyladenosine-3'-phosphate
  modified_base 14: mod_base = OTHER; note = 2'-deoxy-2'-fluoroguanosine-3'-phosphate
  modified_base 15: mod_base = OTHER; note = 2'-O-methylcytidine-3'-phosphate
  modified_base 16: mod_base = OTHER; note = 2'-deoxy-2'-fluorouridine-3'-phosphate
  modified_base 17: mod_base = OTHER; note = 2'-O-methyladenosine-3'-phosphate
  modified_base 18: mod_base = OTHER; note = 2'-O-methylguanosine-3'-phosphate
  modified_base 19: mod_base = OTHER; note = 2'-O-methyluridine-3'-phosphate
  modified_base 20: mod_base = OTHER; note = 2'-O-methylcytidine-3'-phosphate
  modified_base 21: mod_base = OTHER; note = 2'-O-methyluridine-3'-phosphorothioate
  modified_base 22: mod_base = OTHER; note = 2'-O-methyluridine-3'-phosphorothioate
  modified_base 23: mod_base = OTHER; note = 2'-O-methyluridine
tatacaaataacagctagtcttt

SEQ ID NO: 13206 - RNA, 23 nt, synthetic construct
  source 1..23: mol_type = other RNA
  modified_base 1: mod_base = OTHER; note = 2'-O-methyluridine-3'-phosphorothioate 5'-(E)-Vinylphosphonate
  modified_base 2: mod_base = OTHER; note = 2'-deoxy-2'-fluoroguanosine-3'-phosphorothioate
  modified_base 3: mod_base = OTHER; note = 2'-O-methyladenosine-3'-phosphate
  modified_base 4: mod_base = OTHER; note = 2'-O-methylcytidine-3'-phosphate
  modified_base 5: mod_base = OTHER; note = 2'-O-methyladenosine-3'-phosphate
  modified_base 6: mod_base = OTHER; note = 2'-deoxy-2'-fluorouridine-3'-phosphate
  modified_base 7: mod_base = OTHER; note = 2'-O-methyluridine-3'-phosphate
  modified_base 8: mod_base = OTHER; note = 2'-O-methylcytidine-3'-phosphate
  modified_base 9: mod_base = OTHER; note = 2'-O-methyluridine-3'-phosphate
  modified_base 10: mod_base = OTHER; note = 2'-O-methyluridine-3'-phosphate
  modified_base 11: mod_base = OTHER; note = 2'-O-methyluridine-3'-phosphate
  modified_base 12: mod_base = OTHER; note = 2'-O-methyladenosine-3'-phosphate
  modified_base 13: mod_base = OTHER; note = 2'-O-methyluridine-3'-phosphate
  modified_base 14: mod_base = OTHER; note = 2'-deoxy-2'-fluoroadenosine-3'-phosphate
  modified_base 15: mod_base = OTHER; note = 2'-O-methyluridine-3'-phosphate
  modified_base 16: mod_base = OTHER; note = 2'-deoxy-2'-fluoroguanosine-3'-phosphate
  modified_base 17: mod_base = OTHER; note = 2'-O-methyluridine-3'-phosphate
  modified_base 18: mod_base = OTHER; note = 2'-O-methyluridine-3'-phosphate
  modified_base 19: mod_base = OTHER; note = 2'-O-methyladenosine-3'-phosphate
  modified_base 20: mod_base = OTHER; note = 2'-O-methylguanosine-3'-phosphate
  modified_base 21: mod_base = OTHER; note = 2'-O-methylcytidine-3'-phosphorothioate
  modified_base 22: mod_base = OTHER; note = 2'-O-methyluridine-3'-phosphorothioate
  modified_base 23: mod_base = OTHER; note = 2'-O-methyladenosine
tgacattctttatatgttagcta

SEQ ID NO: 13207 - RNA, 23 nt, synthetic construct
  source 1..23: mol_type = other RNA
  modified_base 1: mod_base = OTHER; note = 2'-O-methyluridine-3'-phosphorothioate 5'-(E)-Vinylphosphonate
  modified_base 2: mod_base = OTHER; note = 2'-deoxy-2'-fluoroadenosine-3'-phosphorothioate
  modified_base 3: mod_base = OTHER; note = 2'-O-methyladenosine-3'-phosphate
  modified_base 4: mod_base = OTHER; note = 2'-O-methylguanosine-3'-phosphate
  modified_base 5: mod_base = OTHER; note = 2'-O-methylcytidine-3'-phosphate
  modified_base 6: mod_base = OTHER; note = 2'-deoxy-2'-fluoroadenosine-3'-phosphate
  modified_base 7: mod_base = OTHER; note = 2'-O-methyladenosine-3'-phosphate
  modified_base 8: mod_base = OTHER; note = 2'-O-methyladenosine-3'-phosphate
  modified_base 9: mod_base = OTHER; note = 2'-O-methyladenosine-3'-phosphate
  modified_base 10: mod_base = OTHER; note = 2'-O-methylguanosine-3'-phosphate
  modified_base 11: mod_base = OTHER; note = 2'-O-methyluridine-3'-phosphate
  modified_base 12: mod_base = OTHER; note = 2'-O-methyladenosine-3'-phosphate
  modified_base 13: mod_base = OTHER; note = 2'-O-methylguanosine-3'-phosphate
  modified_base 14: mod_base = OTHER; note = 2'-deoxy-2'-fluoroadenosine-3'-phosphate
  modified_base 15: mod_base = OTHER; note = 2'-O-methylcytidine-3'-phosphate
  modified_base 16: mod_base = OTHER; note = 2'-deoxy-2'-fluoroadenosine-3'-phosphate
  modified_base 17: mod_base = OTHER; note = 2'-O-methyluridine-3'-phosphate
  modified_base 18: mod_base = OTHER; note = 2'-O-methyluridine-3'-phosphate
  modified_base 19: mod_base = OTHER; note = 2'-O-methylcytidine-3'-phosphate
  modified_base 20: mod_base = OTHER; note = 2'-O-methyluridine-3'-phosphate
  modified_base 21: mod_base = OTHER; note = 2'-O-methyluridine-3'-phosphorothioate
  modified_base 22: mod_base = OTHER; note = 2'-O-methyluridine-3'-phosphorothioate
  modified_base 23: mod_base = OTHER; note = 2'-O-methyladenosine
taagcaaaagtagacattcttta

SEQ ID NO: 13208 - RNA, 23 nt, synthetic construct
  source 1..23: mol_type = other RNA
  modified_base 1: mod_base = OTHER; note = 2'-O-methyluridine-3'-phosphorothioate 5'-(E)-Vinylphosphonate
  modified_base 2: mod_base = OTHER; note = 2'-deoxy-2'-fluorouridine-3'-phosphorothioate
  modified_base 3: mod_base = OTHER; note = 2'-O-methyluridine-3'-phosphate
  modified_base 4: mod_base = OTHER; note = 2'-O-methyladenosine-3'-phosphate
  modified_base 5: mod_base = OTHER; note = 2'-O-methyladenosine-3'-phosphate
  modified_base 6: mod_base = OTHER; note = 2'-deoxy-2'-fluoroadenosine-3'-phosphate
  modified_base 7: mod_base = OTHER; note = 2'-O-methylguanosine-3'-phosphate
  modified_base 8: mod_base = OTHER; note = 2'-O-methylcytidine-3'-phosphate
  modified_base 9: mod_base = OTHER; note = 2'-O-methyladenosine-3'-phosphate
  modified_base 10: mod_base = OTHER; note = 2'-O-methyladenosine-3'-phosphate
  modified_base 11: mod_base = OTHER; note = 2'-O-methyladenosine-3'-phosphate
  modified_base 12: mod_base = OTHER; note = 2'-O-methyladenosine-3'-phosphate
  modified_base 13: mod_base = OTHER; note = 2'-O-methylguanosine-3'-phosphate
  modified_base 14: mod_base = OTHER; note = 2'-deoxy-2'-fluorouridine-3'-phosphate
  modified_base 15: mod_base = OTHER; note = 2'-O-methyladenosine-3'-phosphate
  modified_base 16: mod_base = OTHER; note = 2'-deoxy-2'-fluoroguanosine-3'-phosphate
  modified_base 17: mod_base = OTHER; note = 2'-O-methyladenosine-3'-phosphate
  modified_base 18: mod_base = OTHER; note = 2'-O-methylcytidine-3'-phosphate
  modified_base 19: mod_base = OTHER; note = 2'-O-methyladenosine-3'-phosphate
  modified_base 20: mod_base = OTHER; note = 2'-O-methyluridine-3'-phosphate
  modified_base 21: mod_base = OTHER; note = 2'-O-methyluridine-3'-phosphorothioate
  modified_base 22: mod_base = OTHER; note = 2'-O-methylcytidine-3'-phosphorothioate
  modified_base 23: mod_base = OTHER; note = 2'-O-methyluridine
tttaaagcaaaagtagacattct

SEQ ID NO: 13209 - RNA, 23 nt, synthetic construct
  source 1..23: mol_type = other RNA
  modified_base 1: mod_base = OTHER; note = 2'-O-methyluridine-3'-phosphorothioate 5'-(E)-Vinylphosphonate
  modified_base 2: mod_base = OTHER; note = 2'-deoxy-2'-fluorocytidine-3'-phosphorothioate
  modified_base 3: mod_base = OTHER; note = 2'-O-methyluridine-3'-phosphate
  modified_base 4: mod_base = OTHER; note = 2'-O-methyladenosine-3'-phosphate
  modified_base 5: mod_base = OTHER; note = 2'-O-methyladenosine-3'-phosphate
  modified_base 6: mod_base = OTHER; note = 2'-deoxy-2'-fluorouridine-3'-phosphate
  modified_base 7: mod_base = OTHER; note = 2'-O-methyladenosine-3'-phosphate
  modified_base 8: mod_base = OTHER; note = 2'-O-methylguanosine-3'-phosphate
  modified_base 9: mod_base = OTHER; note = 2'-O-methylcytidine-3'-phosphate
  modified_base 10: mod_base = OTHER; note = 2'-O-methyladenosine-3'-phosphate
  modified_base 11: mod_base = OTHER; note = 2'-O-methyluridine-3'-phosphate
  modified_base 12: mod_base = OTHER; note = 2'-O-methyladenosine-3'-phosphate
  modified_base 13: mod_base = OTHER; note = 2'-O-methyladenosine-3'-phosphate
  modified_base 14: mod_base = OTHER; note = 2'-deoxy-2'-fluorouridine-3'-phosphate
  modified_base 15: mod_base = OTHER; note = 2'-O-methylguanosine-3'-phosphate
  modified_base 16: mod_base = OTHER; note = 2'-deoxy-2'-fluoroguanosine-3'-phosphate
  modified_base 17: mod_base = OTHER; note = 2'-O-methylcytidine-3'-phosphate
  modified_base 18: mod_base = OTHER; note = 2'-O-methyluridine-3'-phosphate
  modified_base 19: mod_base = OTHER; note = 2'-O-methyluridine-3'-phosphate
  modified_base 20: mod_base = OTHER; note = 2'-O-methyladenosine-3'-phosphate
  modified_base 21: mod_base = OTHER; note = 2'-O-methylguanosine-3'-phosphorothioate
  modified_base 22: mod_base = OTHER; note = 2'-O-methyluridine-3'-phosphorothioate
  modified_base 23: mod_base = OTHER; note = 2'-O-methyluridine
tctaatagcataatggcttagtt

SEQ ID NO: 13210 - RNA, 23 nt, synthetic construct
  source 1..23: mol_type = other RNA
  modified_base 1: mod_base = OTHER; note = 2'-O-methyluridine-3'-phosphorothioate 5'-(E)-Vinylphosphonate
  modified_base 2: mod_base = OTHER; note = 2'-deoxy-2'-fluoroguanosine-3'-phosphorothioate
  modified_base 3: mod_base = OTHER; note = 2'-O-methylguanosine-3'-phosphate
  modified_base 4: mod_base = OTHER; note = 2'-O-methyladenosine-3'-phosphate
  modified_base 5: mod_base = OTHER; note = 2'-O-methyladenosine-3'-phosphate
  modified_base 6: mod_base = OTHER; note = 2'-deoxy-2'-fluorouridine-3'-phosphate
  modified_base 7: mod_base = OTHER; note = 2'-O-methyluridine-3'-phosphate
  modified_base 8: mod_base = OTHER; note = 2'-O-methyluridine-3'-phosphate
  modified_base 9: mod_base = OTHER; note = 2'-O-methyluridine-3'-phosphate
  modified_base 10: mod_base = OTHER; note = 2'-O-methyladenosine-3'-phosphate
  modified_base 11: mod_base = OTHER; note = 2'-O-methyladenosine-3'-phosphate
  modified_base 12: mod_base = OTHER; note = 2'-O-methyladenosine-3'-phosphate
  modified_base 13: mod_base = OTHER; note = 2'-O-methyladenosine-3'-phosphate
  modified_base 14: mod_base = OTHER; note = 2'-deoxy-2'-fluorouridine-3'-phosphate
  modified_base 15: mod_base = OTHER; note = 2'-O-methyladenosine-3'-phosphate
  modified_base 16: mod_base = OTHER; note = 2'-deoxy-2'-fluoroguanosine-3'-phosphate
  modified_base 17: mod_base = OTHER; note = 2'-O-methylguanosine-3'-phosphate
  modified_base 18: mod_base = OTHER; note = 2'-O-methylguanosine-3'-phosphate
  modified_base 19: mod_base = OTHER; note = 2'-O-methyladenosine-3'-phosphate
  modified_base 20: mod_base = OTHER; note = 2'-O-methyluridine-3'-phosphate
  modified_base 21: mod_base = OTHER; note = 2'-O-methyluridine-3'-phosphorothioate
  modified_base 22: mod_base = OTHER; note = 2'-O-methylguanosine-3'-phosphorothioate
  modified_base 23: mod_base = OTHER; note = 2'-O-methyluridine
tggaattttaaaatagggattgt

SEQ ID NO: 13211 - RNA, 23 nt, synthetic construct
  source 1..23: mol_type = other RNA
  modified_base 1: mod_base = OTHER; note = 2'-O-methyluridine-3'-phosphorothioate 5'-(E)-Vinylphosphonate
  modified_base 2: mod_base = OTHER; note = 2'-deoxy-2'-fluorouridine-3'-phosphorothioate
  modified_base 3: mod_base = OTHER; note = 2'-O-methylguanosine-3'-phosphate
  modified_base 4: mod_base = OTHER; note = 2'-O-methylguanosine-3'-phosphate
  modified_base 5: mod_base = OTHER; note = 2'-O-methylcytidine-3'-phosphate
  modified_base 6: mod_base = OTHER; note = 2'-deoxy-2'-fluoroadenosine-3'-phosphate
  modified_base 7: mod_base = OTHER; note = 2'-O-methylguanosine-3'-phosphate
  modified_base 8: mod_base = OTHER; note = 2'-O-methyluridine-3'-phosphate
  modified_base 9: mod_base = OTHER; note = 2'-O-methyluridine-3'-phosphate
  modified_base 10: mod_base = OTHER; note = 2'-O-methylcytidine-3'-phosphate
  modified_base 11: mod_base = OTHER; note = 2'-O-methyluridine-3'-phosphate
  modified_base 12: mod_base = OTHER; note = 2'-O-methyladenosine-3'-phosphate
  modified_base 13: mod_base = OTHER; note = 2'-O-methyluridine-3'-phosphate
  modified_base 14: mod_base = OTHER; note = 2'-deoxy-2'-fluorouridine-3'-phosphate
  modified_base 15: mod_base = OTHER; note = 2'-O-methyladenosine-3'-phosphate
  modified_base 16: mod_base = OTHER; note = 2'-deoxy-2'-fluorouridine-3'-phosphate
  modified_base 17: mod_base = OTHER; note = 2'-O-methyluridine-3'-phosphate
  modified_base 18: mod_base = OTHER; note = 2'-O-methylguanosine-3'-phosphate
  modified_base 19: mod_base = OTHER; note = 2'-O-methyluridine-3'-phosphate
  modified_base 20: mod_base = OTHER; note = 2'-O-methyluridine-3'-phosphate
  modified_base 21: mod_base = OTHER; note = 2'-O-methyladenosine-3'-phosphorothioate
  modified_base 22: mod_base = OTHER; note = 2'-O-methylguanosine-3'-phosphorothioate
  modified_base 23: mod_base = OTHER; note = 2'-O-methylguanosine
ttggcagttctattattgttagg

SEQ ID NO: 13212 - RNA, 23 nt, synthetic construct
  source 1..23: mol_type = other RNA
  modified_base 1: mod_base = OTHER; note = 2'-O-methyluridine-3'-phosphorothioate 5'-(E)-Vinylphosphonate
  modified_base 2: mod_base = OTHER; note = 2'-deoxy-2'-fluorouridine-3'-phosphorothioate
  modified_base 3: mod_base = OTHER; note = 2'-O-methyladenosine-3'-phosphate
  modified_base 4: mod_base = OTHER; note = 2'-O-methylcytidine-3'-phosphate
  modified_base 5: mod_base = OTHER; note = 2'-O-methyladenosine-3'-phosphate
  modified_base 6: mod_base = OTHER; note = 2'-deoxy-2'-fluoroadenosine-3'-phosphate
  modified_base 7: mod_base = OTHER; note = 2'-O-methylcytidine-3'-phosphate
  modified_base 8: mod_base = OTHER; note = 2'-O-methyluridine-3'-phosphate
  modified_base 9: mod_base = OTHER; note = 2'-O-methylguanosine-3'-phosphate
  modified_base 10: mod_base = OTHER; note = 2'-O-methyladenosine-3'-phosphate
  modified_base 11: mod_base = OTHER; note = 2'-O-methyladenosine-3'-phosphate
  modified_base 12: mod_base = OTHER; note = 2'-O-methyladenosine-3'-phosphate
  modified_base 13: mod_base = OTHER; note = 2'-O-methylguanosine-3'-phosphate
  modified_base 14: mod_base = OTHER; note = 2'-deoxy-2'-fluoroadenosine-3'-phosphate
  modified_base 15: mod_base = OTHER; note = 2'-O-methylguanosine-3'-phosphate
  modified_base 16: mod_base = OTHER; note = 2'-deoxy-2'-fluoroadenosine-3'-phosphate
  modified_base 17: mod_base = OTHER; note = 2'-O-methyladenosine-3'-phosphate
  modified_base 18: mod_base = OTHER; note = 2'-O-methyladenosine-3'-phosphate
  modified_base 19: mod_base = OTHER; note = 2'-O-methyladenosine-3'-phosphate
  modified_base 20: mod_base = OTHER; note = 2'-O-methylguanosine-3'-phosphate
  modified_base 21: mod_base = OTHER; note = 2'-O-methyluridine-3'-phosphorothioate
  modified_base 22: mod_base = OTHER; note = 2'-O-methyladenosine-3'-phosphorothioate
  modified_base 23: mod_base = OTHER; note = 2'-O-methyluridine
ttacaactgaaagagaaaagtat

SEQ ID NO: 13213 - RNA, 23 nt, synthetic construct
  source 1..23: mol_type = other RNA
  modified_base 1: mod_base = OTHER; note = 2'-O-methyluridine-3'-phosphorothioate 5'-(E)-Vinylphosphonate
  modified_base 2: mod_base = OTHER; note = 2'-deoxy-2'-fluoroadenosine-3'-phosphorothioate
  modified_base 3: mod_base = OTHER; note = 2'-O-methyladenosine-3'-phosphate
  modified_base 4: mod_base = OTHER; note = 2'-O-methyladenosine-3'-phosphate
  modified_base 5: mod_base = OTHER; note = 2'-O-methyluridine-3'-phosphate
  modified_base 6: mod_base = OTHER; note = 2'-deoxy-2'-fluoroadenosine-3'-phosphate
  modified_base 7: mod_base = OTHER; note = 2'-O-methylguanosine-3'-phosphate
  modified_base 8: mod_base = OTHER; note = 2'-O-methylguanosine-3'-phosphate
  modified_base 9: mod_base = OTHER; note = 2'-O-methylguanosine-3'-phosphate
  modified_base 10: mod_base = OTHER; note = 2'-O-methyladenosine-3'-phosphate
  modified_base 11: mod_base = OTHER; note = 2'-O-methyluridine-3'-phosphate
  modified_base 12: mod_base = OTHER; note = 2'-O-methyluridine-3'-phosphate
  modified_base 13: mod_base = OTHER; note = 2'-O-methylguanosine-3'-phosphate
  modified_base 14: mod_base = OTHER; note = 2'-deoxy-2'-fluorouridine-3'-phosphate
  modified_base 15: mod_base = OTHER; note = 2'-O-methyluridine-3'-phosphate
  modified_base 16: mod_base = OTHER; note = 2'-deoxy-2'-fluoroadenosine-3'-phosphate
  modified_base 17: mod_base = OTHER; note = 2'-O-methylcytidine-3'-phosphate
  modified_base 18: mod_base = OTHER; note = 2'-O-methylcytidine-3'-phosphate
  modified_base 19: mod_base = OTHER; note = 2'-O-methyluridine-3'-phosphate
  modified_base 20: mod_base = OTHER; note = 2'-O-methyladenosine-3'-phosphate
  modified_base 21: mod_base = OTHER; note = 2'-O-methyladenosine-3'-phosphorothioate
  modified_base 22: mod_base = OTHER; note = 2'-O-methyluridine-3'-phosphorothioate
  modified_base 23: mod_base = OTHER; note = 2'-O-methyluridine
taaatagggattgttacctaatt

SEQ ID NO: 13214 - RNA, 23 nt, synthetic construct
  source 1..23: mol_type = other RNA
  modified_base 1: mod_base = OTHER; note = 2'-O-methyluridine-3'-phosphorothioate 5'-(E)-Vinylphosphonate
  modified_base 2: mod_base = OTHER; note = 2'-deoxy-2'-fluoroadenosine-3'-phosphorothioate
  modified_base 3: mod_base = OTHER; note = 2'-O-methyladenosine-3'-phosphate
  modified_base 4: mod_base = OTHER; note = 2'-O-methyladenosine-3'-phosphate
  modified_base 5: mod_base = OTHER; note = 2'-O-methyladenosine-3'-phosphate
  modified_base 6: mod_base = OTHER; note = 2'-deoxy-2'-fluorouridine-3'-phosphate
  modified_base 7: mod_base = OTHER; note = 2'-O-methyladenosine-3'-phosphate
  modified_base 8: mod_base = OTHER; note = 2'-O-methylguanosine-3'-phosphate
  modified_base 9: mod_base = OTHER; note = 2'-O-methylguanosine-3'-phosphate
  modified_base 10: mod_base = OTHER; note = 2'-O-methylguanosine-3'-phosphate
  modified_base 11: mod_base = OTHER; note = 2'-O-methyladenosine-3'-phosphate
  modified_base 12: mod_base = OTHER; note = 2'-O-methyluridine-3'-phosphate
  modified_base 13: mod_base = OTHER; note = 2'-O-methyluridine-3'-phosphate
  modified_base 14: mod_base = OTHER; note = 2'-deoxy-2'-fluoroguanosine-3'-phosphate
  modified_base 15: mod_base = OTHER; note = 2'-O-methyluridine-3'-phosphate
  modified_base 16: mod_base = OTHER; note = 2'-deoxy-2'-fluorouridine-3'-phosphate
  modified_base 17: mod_base = OTHER; note = 2'-O-methyladenosine-3'-phosphate
  modified_base 18: mod_base = OTHER; note = 2'-O-methylcytidine-3'-phosphate
  modified_base 19: mod_base = OTHER; note = 2'-O-methylcytidine-3'-phosphate
  modified_base 20: mod_base = OTHER; note = 2'-O-methyluridine-3'-phosphate
  modified_base 21: mod_base = OTHER; note = 2'-O-methyladenosine-3'-phosphorothioate
  modified_base 22: mod_base = OTHER; note = 2'-O-methyladenosine-3'-phosphorothioate
  modified_base 23: mod_base = OTHER; note = 2'-O-methyluridine
taaaatagggattgttacctaat

SEQ ID NO: 13215 - RNA, 23 nt, synthetic construct
  source 1..23: mol_type = other RNA
  modified_base 1: mod_base = OTHER; note = 2'-O-methyluridine-3'-phosphorothioate 5'-(E)-Vinylphosphonate
  modified_base 2: mod_base = OTHER; note = 2'-deoxy-2'-fluorouridine-3'-phosphorothioate
  modified_base 3: mod_base = OTHER; note = 2'-O-methyladenosine-3'-phosphate
  modified_base 4: mod_base = OTHER; note = 2'-O-methyladenosine-3'-phosphate
  modified_base 5: mod_base = OTHER; note = 2'-O-methyladenosine-3'-phosphate
  modified_base 6: mod_base = OTHER; note = 2'-deoxy-2'-fluoroadenosine-3'-phosphate
  modified_base 7: mod_base = OTHER; note = 2'-O-methyluridine-3'-phosphate
  modified_base 8: mod_base = OTHER; note = 2'-O-methyladenosine-3'-phosphate
  modified_base 9: mod_base = OTHER; note = 2'-O-methylguanosine-3'-phosphate
  modified_base 10: mod_base = OTHER; note = 2'-O-methylguanosine-3'-phosphate
  modified_base 11: mod_base = OTHER; note = 2'-O-methylguanosine-3'-phosphate
  modified_base 12: mod_base = OTHER; note = 2'-O-methyladenosine-3'-phosphate
  modified_base 13: mod_base = OTHER; note = 2'-O-methyluridine-3'-phosphate
  modified_base 14: mod_base = OTHER; note = 2'-deoxy-2'-fluorouridine-3'-phosphate
  modified_base 15: mod_base = OTHER; note = 2'-O-methylguanosine-3'-phosphate
  modified_base 16: mod_base = OTHER; note = 2'-deoxy-2'-fluorouridine-3'-phosphate
  modified_base 17: mod_base = OTHER; note = 2'-O-methyluridine-3'-phosphate
  modified_base 18: mod_base = OTHER; note = 2'-O-methyladenosine-3'-phosphate
  modified_base 19: mod_base = OTHER; note = 2'-O-methylcytidine-3'-phosphate
  modified_base 20: mod_base = OTHER; note = 2'-O-methylcytidine-3'-phosphate
  modified_base 21: mod_base = OTHER; note = 2'-O-methyluridine-3'-phosphorothioate
  modified_base 22: mod_base = OTHER; note = 2'-O-methyladenosine-3'-phosphorothioate
  modified_base 23: mod_base = OTHER; note = 2'-O-methyladenosine
ttaaaatagggattgttacctaa

SEQ ID NO: 13216 - RNA, 23 nt, synthetic construct
  source 1..23: mol_type = other RNA
  modified_base 1: mod_base = OTHER; note = 2'-O-methyluridine-3'-phosphorothioate 5'-(E)-Vinylphosphonate
  modified_base 2: mod_base = OTHER; note = 2'-deoxy-2'-fluorouridine-3'-phosphorothioate
  modified_base 3: mod_base = OTHER; note = 2'-O-methyluridine-3'-phosphate
  modified_base 4: mod_base = OTHER; note = 2'-O-methyladenosine-3'-phosphate
  modified_base 5: mod_base = OTHER; note = 2'-O-methyladenosine-3'-phosphate
  modified_base 6: mod_base = OTHER; note = 2'-deoxy-2'-fluoroadenosine-3'-phosphate
  modified_base 7: mod_base = OTHER; note = 2'-O-methyladenosine-3'-phosphate
  modified_base 8: mod_base = OTHER; note = 2'-O-methyluridine-3'-phosphate
  modified_base 9: mod_base = OTHER; note = 2'-O-methyladenosine-3'-phosphate
  modified_base 10: mod_base = OTHER; note = 2'-O-methylguanosine-3'-phosphate
  modified_base 11: mod_base = OTHER; note = 2'-O-methylguanosine-3'-phosphate
  modified_base 12: mod_base = OTHER; note = 2'-O-methylguanosine-3'-phosphate
  modified_base 13: mod_base = OTHER; note = 2'-O-methyladenosine-3'-phosphate
  modified_base 14: mod_base = OTHER; note = 2'-deoxy-2'-fluorouridine-3'-phosphate
  modified_base 15: mod_base = OTHER; note = 2'-O-methyluridine-3'-phosphate
  modified_base 16: mod_base = OTHER; note = 2'-deoxy-2'-fluoroguanosine-3'-phosphate
  modified_base 17: mod_base = OTHER; note = 2'-O-methyluridine-3'-phosphate
  modified_base 18: mod_base = OTHER; note = 2'-O-methyluridine-3'-phosphate
  modified_base 19: mod_base = OTHER; note = 2'-O-methyladenosine-3'-phosphate
  modified_base 20: mod_base = OTHER; note = 2'-O-methylcytidine-3'-phosphate
  modified_base 21: mod_base = OTHER; note = 2'-O-methylcytidine-3'-phosphorothioate
  modified_base 22: mod_base = OTHER; note = 2'-O-methyluridine-3'-phosphorothioate
  modified_base 23: mod_base = OTHER; note = 2'-O-methyladenosine
tttaaaatagggattgttaccta

SEQ ID NO: 13217 - RNA, 23 nt, synthetic construct
  source 1..23: mol_type = other RNA
  modified_base 1: mod_base = OTHER; note = 2'-O-methyluridine-3'-phosphorothioate 5'-(E)-Vinylphosphonate
  modified_base 2: mod_base = OTHER; note = 2'-deoxy-2'-fluorouridine-3'-phosphorothioate
  modified_base 3: mod_base = OTHER; note = 2'-O-methyluridine-3'-phosphate
  modified_base 4: mod_base = OTHER; note = 2'-O-methyluridine-3'-phosphate
  modified_base 5: mod_base = OTHER; note = 2'-O-methyladenosine-3'-phosphate
  modified_base 6: mod_base = OTHER; note = 2'-deoxy-2'-fluoroadenosine-3'-phosphate
  modified_base 7: mod_base = OTHER; note = 2'-O-methyladenosine-3'-phosphate
  modified_base 8: mod_base = OTHER; note = 2'-O-methyladenosine-3'-phosphate
  modified_base 9: mod_base = OTHER; note = 2'-O-methyluridine-3'-phosphate
  modified_base 10: mod_base = OTHER; note = 2'-O-methyladenosine-3'-phosphate
  modified_base 11: mod_base = OTHER; note = 2'-O-methylguanosine-3'-phosphate
  modified_base 12: mod_base = OTHER; note = 2'-O-methylguanosine-3'-phosphate
  modified_base 13: mod_base = OTHER; note = 2'-O-methylguanosine-3'-phosphate
  modified_base 14: mod_base = OTHER; note = 2'-deoxy-2'-fluoroadenosine-3'-phosphate
  modified_base 15: mod_base = OTHER; note = 2'-O-methyluridine-3'-phosphate
  modified_base 16: mod_base = OTHER; note = 2'-deoxy-2'-fluorouridine-3'-phosphate
  modified_base 17: mod_base = OTHER; note = 2'-O-methylguanosine-3'-phosphate
  modified_base 18: mod_base = OTHER; note = 2'-O-methyluridine-3'-phosphate
  modified_base 19: mod_base = OTHER; note = 2'-O-methyluridine-3'-phosphate
  modified_base 20: mod_base = OTHER; note = 2'-O-methyladenosine-3'-phosphate
  modified_base 21: mod_base = OTHER; note = 2'-O-methylcytidine-3'-phosphorothioate
  modified_base 22: mod_base = OTHER; note = 2'-O-methylcytidine-3'-phosphorothioate
  modified_base 23: mod_base = OTHER; note = 2'-O-methyluridine
ttttaaaatagggattgttacct

SEQ ID NO: 13218 - RNA, 23 nt, synthetic construct
  source 1..23: mol_type = other RNA
  modified_base 1: mod_base = OTHER; note = 2'-O-methyluridine-3'-phosphorothioate 5'-(E)-Vinylphosphonate
  modified_base 2: mod_base = OTHER; note = 2'-deoxy-2'-fluorouridine-3'-phosphorothioate
  modified_base 3: mod_base = OTHER; note = 2'-O-methyluridine-3'-phosphate
  modified_base 4: mod_base = OTHER; note = 2'-O-methyluridine-3'-phosphate
  modified_base 5: mod_base = OTHER; note = 2'-O-methyluridine-3'-phosphate
  modified_base 6: mod_base = OTHER; note = 2'-deoxy-2'-fluoroadenosine-3'-phosphate
  modified_base 7: mod_base = OTHER; note = 2'-O-methyladenosine-3'-phosphate
  modified_base 8: mod_base = OTHER; note = 2'-O-methyladenosine-3'-phosphate
  modified_base 9: mod_base = OTHER; note = 2'-O-methyladenosine-3'-phosphate
  modified_base 10: mod_base = OTHER; note = 2'-O-methyluridine-3'-phosphate
  modified_base 11: mod_base = OTHER; note = 2'-O-methyladenosine-3'-phosphate
  modified_base 12: mod_base = OTHER; note = 2'-O-methylguanosine-3'-phosphate
  modified_base 13: mod_base = OTHER; note = 2'-O-methylguanosine-3'-phosphate
  modified_base 14: mod_base = OTHER; note = 2'-deoxy-2'-fluoroguanosine-3'-phosphate
  modified_base 15: mod_base = OTHER; note = 2'-O-methyladenosine-3'-phosphate
  modified_base 16: mod_base = OTHER; note = 2'-deoxy-2'-fluorouridine-3'-phosphate
  modified_base 17: mod_base = OTHER; note = 2'-O-methyluridine-3'-phosphate
  modified_base 18: mod_base = OTHER; note = 2'-O-methylguanosine-3'-phosphate
  modified_base 19: mod_base = OTHER; note = 2'-O-methyluridine-3'-phosphate
  modified_base 20: mod_base = OTHER; note = 2'-O-methyluridine-3'-phosphate
  modified_base 21: mod_base = OTHER; note = 2'-O-methyladenosine-3'-phosphorothioate
  modified_base 22: mod_base = OTHER; note = 2'-O-methylcytidine-3'-phosphorothioate
  modified_base 23: mod_base = OTHER; note = 2'-O-methylcytidine
tttttaaaatagggattgttacc

SEQ ID NO: 13219 - RNA, 23 nt, synthetic construct
  source 1..23: mol_type = other RNA
  modified_base 1: mod_base = OTHER; note = 2'-O-methyluridine-3'-phosphorothioate 5'-(E)-Vinylphosphonate
  modified_base 2: mod_base = OTHER; note = 2'-deoxy-2'-fluoroguanosine-3'-phosphorothioate
  modified_base 3: mod_base = OTHER; note = 2'-O-methylguanosine-3'-phosphate
  modified_base 4: mod_base = OTHER; note = 2'-O-methylcytidine-3'-phosphate
  modified_base 5: mod_base = OTHER; note = 2'-O-methyladenosine-3'-phosphate
  modified_base 6: mod_base = OTHER; note = 2'-deoxy-2'-fluoroguanosine-3'-phosphate
  modified_base 7: mod_base = OTHER; note = 2'-O-methyluridine-3'-phosphate
  modified_base 8: mod_base = OTHER; note = 2'-O-methyluridine-3'-phosphate
  modified_base 9: mod_base = OTHER; note = 2'-O-methylcytidine-3'-phosphate
  modified_base 10: mod_base = OTHER; note = 2'-O-methyluridine-3'-phosphate
  modified_base 11: mod_base = OTHER; note = 2'-O-methyladenosine-3'-phosphate
  modified_base 12: mod_base = OTHER; note = 2'-O-methyluridine-3'-phosphate
  modified_base 13: mod_base = OTHER; note = 2'-O-methyluridine-3'-phosphate
  modified_base 14: mod_base = OTHER; note = 2'-deoxy-2'-fluoroadenosine-3'-phosphate
  modified_base 15: mod_base = OTHER; note = 2'-O-methyluridine-3'-phosphate
  modified_base 16: mod_base = OTHER; note = 2'-deoxy-2'-fluorouridine-3'-phosphate
  modified_base 17: mod_base = OTHER; note = 2'-O-methylguanosine-3'-phosphate
  modified_base 18: mod_base = OTHER; note = 2'-O-methyluridine-3'-phosphate
  modified_base 19: mod_base = OTHER; note = 2'-O-methyluridine-3'-phosphate
  modified_base 20: mod_base = OTHER; note = 2'-O-methyladenosine-3'-phosphate
  modified_base 21: mod_base = OTHER; note = 2'-O-methylguanosine-3'-phosphorothioate
  modified_base 22: mod_base = OTHER; note = 2'-O-methylguanosine-3'-phosphorothioate
  modified_base 23: mod_base = OTHER; note = 2'-O-methylguanosine
tggcagttctattattgttaggg

SEQ ID NO: 13220 - RNA, 23 nt, synthetic construct
  source 1..23: mol_type = other RNA
  modified_base 1: mod_base = OTHER; note = 2'-O-methyluridine-3'-phosphorothioate 5'-(E)-Vinylphosphonate
  modified_base 2: mod_base = OTHER; note = 2'-deoxy-2'-fluorocytidine-3'-phosphorothioate
  modified_base 3: mod_base = OTHER; note = 2'-O-methyluridine-3'-phosphate
  modified_base 4: mod_base = OTHER; note = 2'-O-methylguanosine-3'-phosphate
  modified_base 5: mod_base = OTHER; note = 2'-O-methylguanosine-3'-phosphate
  modified_base 6: mod_base = OTHER; note = 2'-deoxy-2'-fluorocytidine-3'-phosphate
  modified_base 7: mod_base = OTHER; note = 2'-O-methyladenosine-3'-phosphate
  modified_base 8: mod_base = OTHER; note = 2'-O-methylguanosine-3'-phosphate
  modified_base 9: mod_base = OTHER; note = 2'-O-methyluridine-3'-phosphate
  modified_base 10: mod_base = OTHER; note = 2'-O-methyluridine-3'-phosphate
  modified_base 11: mod_base = OTHER; note = 2'-O-methylcytidine-3'-phosphate
  modified_base 12: mod_base = OTHER; note = 2'-O-methyluridine-3'-phosphate
  modified_base 13: mod_base = OTHER; note = 2'-O-methyladenosine-3'-phosphate
  modified_base 14: mod_base = OTHER; note = 2'-deoxy-2'-fluorouridine-3'-phosphate
  modified_base 15: mod_base = OTHER; note = 2'-O-methyluridine-3'-phosphate
  modified_base 16: mod_base = OTHER; note = 2'-deoxy-2'-fluoroadenosine-3'-phosphate
  modified_base 17: mod_base = OTHER; note = 2'-O-methyluridine-3'-phosphate
  modified_base 18: mod_base = OTHER; note = 2'-O-methyluridine-3'-phosphate
  modified_base 19: mod_base = OTHER; note = 2'-O-methylguanosine-3'-phosphate
  modified_base 20: mod_base = OTHER; note = 2'-O-methyluridine-3'-phosphate
  modified_base 21: mod_base = OTHER; note = 2'-O-methyluridine-3'-phosphorothioate
  modified_base 22: mod_base = OTHER; note = 2'-O-methyladenosine-3'-phosphorothioate
  modified_base 23: mod_base = OTHER; note = 2'-O-methylguanosine
tctggcagttctattattgttag

SEQ ID NO: 13221 - RNA, 23 nt, synthetic construct
  source 1..23: mol_type = other RNA
  modified_base 1: mod_base = OTHER; note = 2'-O-methyluridine-3'-phosphorothioate 5'-(E)-Vinylphosphonate
  modified_base 2: mod_base = OTHER; note = 2'-deoxy-2'-fluoroguanosine-3'-phosphorothioate
  modified_base 3: mod_base = OTHER; note = 2'-O-methylcytidine-3'-phosphate
  modified_base 4: mod_base = OTHER; note = 2'-O-methyluridine-3'-phosphate
  modified_base 5: mod_base = OTHER; note = 2'-O-methylguanosine-3'-phosphate
  modified_base 6: mod_base = OTHER; note = 2'-deoxy-2'-fluoroguanosine-3'-phosphate
  modified_base 7: mod_base = OTHER; note = 2'-O-methylcytidine-3'-phosphate
  modified_base 8: mod_base = OTHER; note = 2'-O-methyladenosine-3'-phosphate
  modified_base 9: mod_base = OTHER; note = 2'-O-methylguanosine-3'-phosphate
  modified_base 10: mod_base = OTHER; note = 2'-O-methyluridine-3'-phosphate
  modified_base 11: mod_base = OTHER; note = 2'-O-methyluridine-3'-phosphate
  modified_base 12: mod_base = OTHER; note = 2'-O-methylcytidine-3'-phosphate
  modified_base 13: mod_base = OTHER; note = 2'-O-methyluridine-3'-phosphate
  modified_base 14: mod_base = OTHER; note = 2'-deoxy-2'-fluoroadenosine-3'-phosphate
  modified_base 15: mod_base = OTHER; note = 2'-O-methyluridine-3'-phosphate
  modified_base 16: mod_base = OTHER; note = 2'-deoxy-2'-fluorouridine-3'-phosphate
  modified_base 17: mod_base = OTHER; note = 2'-O-methyladenosine-3'-phosphate
  modified_base 18: mod_base = OTHER; note = 2'-O-methyluridine-3'-phosphate
  modified_base 19: mod_base = OTHER; note = 2'-O-methyluridine-3'-phosphate
  modified_base 20: mod_base = OTHER; note = 2'-O-methylguanosine-3'-phosphate
  modified_base 21: mod_base = OTHER; note = 2'-O-methyluridine-3'-phosphorothioate
  modified_base 22: mod_base = OTHER; note = 2'-O-methyluridine-3'-phosphorothioate
  modified_base 23: mod_base = OTHER; note = 2'-O-methyladenosine
tgctggcagttctattattgtta

SEQ ID NO: 13222 - RNA, 23 nt, synthetic construct
  source 1..23: mol_type = other RNA
  modified_base 1: mod_base = OTHER; note = 2'-O-methyluridine-3'-phosphorothioate 5'-(E)-Vinylphosphonate
  modified_base 2: mod_base = OTHER; note = 2'-deoxy-2'-fluoroadenosine-3'-phosphorothioate
  modified_base 3: mod_base = OTHER; note = 2'-O-methylguanosine-3'-phosphate
  modified_base 4: mod_base = OTHER; note = 2'-O-methyladenosine-3'-phosphate
  modified_base 5: mod_base = OTHER; note = 2'-O-methyladenosine-3'-phosphate
  modified_base 6: mod_base = OTHER; note = 2'-deoxy-2'-fluoroadenosine-3'-phosphate
  modified_base 7: mod_base = OTHER; note = 2'-O-methyladenosine-3'-phosphate
  modified_base 8: mod_base = OTHER; note = 2'-O-methylguanosine-3'-phosphate
  modified_base 9: mod_base = OTHER; note = 2'-O-methyluridine-3'-phosphate
  modified_base 10: mod_base = OTHER; note = 2'-O-methyladenosine-3'-phosphate
  modified_base 11: mod_base = OTHER; note = 2'-O-methyluridine-3'-phosphate
  modified_base 12: mod_base = OTHER; note = 2'-O-methylguanosine-3'-phosphate
  modified_base 13: mod_base = OTHER; note = 2'-O-methylcytidine-3'-phosphate
  modified_base 14: mod_base = OTHER; note = 2'-deoxy-2'-fluorouridine-3'-phosphate
  modified_base 15: mod_base = OTHER; note = 2'-O-methylguanosine-3'-phosphate
  modified_base 16: mod_base = OTHER; note = 2'-deoxy-2'-fluoroguanosine-3'-phosphate
  modified_base 17: mod_base = OTHER; note = 2'-O-methylcytidine-3'-phosphate
  modified_base 18: mod_base = OTHER; note = 2'-O-methyladenosine-3'-phosphate
  modified_base 19: mod_base = OTHER; note = 2'-O-methylguanosine-3'-phosphate
  modified_base 20: mod_base = OTHER; note = 2'-O-methyluridine-3'-phosphate
  modified_base 21: mod_base = OTHER; note = 2'-O-methyluridine-3'-phosphorothioate
  modified_base 22: mod_base = OTHER; note = 2'-O-methylcytidine-3'-phosphorothioate
  modified_base 23: mod_base = OTHER; note = 2'-O-methyluridine
tagaaaagtatgctggcagttct

SEQ ID NO: 13223 - RNA, 23 nt, synthetic construct
  source 1..23: mol_type = other RNA
  modified_base 1: mod_base = OTHER; note = 2'-O-methyluridine-3'-phosphorothioate 5'-(E)-Vinylphosphonate
  modified_base 2: mod_base = OTHER; note = 2'-deoxy-2'-fluoroguanosine-3'-phosphorothioate
  modified_base 3: mod_base = OTHER; note = 2'-O-methyladenosine-3'-phosphate
  modified_base 4: mod_base = OTHER; note = 2'-O-methylguanosine-3'-phosphate
  modified_base 5: mod_base = OTHER; note = 2'-O-methyladenosine-3'-phosphate
  modified_base 6: mod_base = OTHER; note = 2'-deoxy-2'-fluoroadenosine-3'-phosphate
  modified_base 7: mod_base = OTHER; note = 2'-O-methyladenosine-3'-phosphate
  modified_base 8: mod_base = OTHER; note = 2'-O-methyladenosine-3'-phosphate
  modified_base 9: mod_base = OTHER; note = 2'-O-methylguanosine-3'-phosphate
  modified_base 10: mod_base = OTHER; note = 2'-O-methyluridine-3'-phosphate
  modified_base 11: mod_base = OTHER; note = 2'-O-methyladenosine-3'-phosphate
  modified_base 12: mod_base = OTHER; note = 2'-O-methyluridine-3'-phosphate
  modified_base 13: mod_base = OTHER; note = 2'-O-methylguanosine-3'-phosphate
  modified_base 14: mod_base = OTHER; note = 2'-deoxy-2'-fluorocytidine-3'-phosphate
  modified_base 15: mod_base = OTHER; note = 2'-O-methyluridine-3'-phosphate
  modified_base 16: mod_base = OTHER; note = 2'-deoxy-2'-fluoroguanosine-3'-phosphate
  modified_base 17: mod_base = OTHER; note = 2'-O-methylguanosine-3'-phosphate
  modified_base 18: mod_base = OTHER; note = 2'-O-methylcytidine-3'-phosphate
  modified_base 19: mod_base = OTHER; note = 2'-O-methyladenosine-3'-phosphate
  modified_base 20: mod_base = OTHER; note = 2'-O-methylguanosine-3'-phosphate
  modified_base 21: mod_base = OTHER; note = 2'-O-methyluridine-3'-phosphorothioate
  modified_base 22: mod_base = OTHER; note = 2'-O-methyluridine-3'-phosphorothioate
  modified_base 23: mod_base = OTHER; note = 2'-O-methylcytidine
tgagaaaagtatgctggcagttc

SEQ ID NO: 13224 - RNA, 23 nt, synthetic construct
  source 1..23: mol_type = other RNA
  modified_base 1: mod_base = OTHER; note = 2'-O-methyluridine-3'-phosphorothioate 5'-(E)-Vinylphosphonate
  modified_base 2: mod_base = OTHER; note = 2'-deoxy-2'-fluoroadenosine-3'-phosphorothioate
  modified_base 3: mod_base = OTHER; note = 2'-O-methylguanosine-3'-phosphate
  modified_base 4: mod_base = OTHER; note = 2'-O-methyladenosine-3'-phosphate
  modified_base 5: mod_base = OTHER; note = 2'-O-methylguanosine-3'-phosphate
  modified_base 6: mod_base = OTHER; note = 2'-deoxy-2'-fluoroadenosine-3'-phosphate
  modified_base 7: mod_base = OTHER; note = 2'-O-methyladenosine-3'-phosphate
  modified_base 8: mod_base = OTHER; note = 2'-O-methyladenosine-3'-phosphate
  modified_base 9: mod_base = OTHER; note = 2'-O-methyladenosine-3'-phosphate
  modified_base 10: mod_base = OTHER; note = 2'-O-methylguanosine-3'-phosphate
  modified_base 11: mod_base = OTHER; note = 2'-O-methyluridine-3'-phosphate
  modified_base 12: mod_base = OTHER; note = 2'-O-methyladenosine-3'-phosphate
  modified_base 13: mod_base = OTHER; note = 2'-O-methyluridine-3'-phosphate
  modified_base 14: mod_base = OTHER; note = 2'-deoxy-2'-fluoroguanosine-3'-phosphate
  modified_base 15: mod_base = OTHER; note = 2'-O-methylcytidine-3'-phosphate
  modified_base 16: mod_base = OTHER; note = 2'-deoxy-2'-fluorouridine-3'-phosphate
  modified_base 17: mod_base = OTHER; note = 2'-O-methylguanosine-3'-phosphate
  modified_base 18: mod_base = OTHER; note = 2'-O-methylguanosine-3'-phosphate
  modified_base 19: mod_base = OTHER; note = 2'-O-methylcytidine-3'-phosphate
  modified_base 20: mod_base = OTHER; note = 2'-O-methyladenosine-3'-phosphate
  modified_base 21: mod_base = OTHER; note = 2'-O-methylguanosine-3'-phosphorothioate
  modified_base 22: mod_base = OTHER; note = 2'-O-methyluridine-3'-phosphorothioate
  modified_base 23: mod_base = OTHER; note = 2'-O-methyluridine
tagagaaaagtatgctggcagtt

SEQ ID NO: 13225 - RNA, 23 nt, synthetic construct
  source 1..23: mol_type = other RNA
  modified_base 1: mod_base = OTHER; note = 2'-O-methyluridine-3'-phosphorothioate 5'-(E)-Vinylphosphonate
  modified_base 2: mod_base = OTHER; note = 2'-deoxy-2'-fluoroadenosine-3'-phosphorothioate
  modified_base 3: mod_base = OTHER; note = 2'-O-methyladenosine-3'-phosphate
  modified_base 4: mod_base = OTHER; note = 2'-O-methylguanosine-3'-phosphate
  modified_base 5: mod_base = OTHER; note = 2'-O-methyladenosine-3'-phosphate
  modified_base 6: mod_base = OTHER; note = 2'-deoxy-2'-fluoroguanosine-3'-phosphate
  modified_base 7: mod_base = OTHER; note = 2'-O-methyladenosine-3'-phosphate
  modified_base 8: mod_base = OTHER; note = 2'-O-methyladenosine-3'-phosphate
  modified_base 9: mod_base = OTHER; note = 2'-O-methyladenosine-3'-phosphate
  modified_base 10: mod_base = OTHER; note = 2'-O-methyladenosine-3'-phosphate
  modified_base 11: mod_base = OTHER; note = 2'-O-methylguanosine-3'-phosphate
  modified_base 12: mod_base = OTHER; note = 2'-O-methyluridine-3'-phosphate
  modified_base 13: mod_base = OTHER; note = 2'-O-methyladenosine-3'-phosphate
  modified_base 14: mod_base = OTHER; note = 2'-deoxy-2'-fluorouridine-3'-phosphate
  modified_base 15: mod_base = OTHER; note = 2'-O-methylguanosine-3'-phosphate
  modified_base 16: mod_base = OTHER; note = 2'-deoxy-2'-fluorocytidine-3'-phosphate
  modified_base 17: mod_base = OTHER; note = 2'-O-methyluridine-3'-phosphate
  modified_base 18: mod_base = OTHER; note = 2'-O-methylguanosine-3'-phosphate
  modified_base 19: mod_base = OTHER; note = 2'-O-methylguanosine-3'-phosphate
  modified_base 20: mod_base = OTHER; note = 2'-O-methylcytidine-3'-phosphate
  modified_base 21: mod_base = OTHER; note = 2'-O-methyladenosine-3'-phosphorothioate
  modified_base 22: mod_base = OTHER; note = 2'-O-methylguanosine-3'-phosphorothioate
  modified_base 23: mod_base = OTHER; note = 2'-O-methyluridine
taagagaaaagtatgctggcagt

SEQ ID NO: 13226 - RNA, 23 nt, synthetic construct
  source 1..23: mol_type = other RNA
  modified_base 1: mod_base = OTHER; note = 2'-O-methyluridine-3'-phosphorothioate 5'-(E)-Vinylphosphonate
  modified_base 2: mod_base = OTHER; note = 2'-deoxy-2'-fluoroadenosine-3'-phosphorothioate
  modified_base 3: mod_base = OTHER; note = 2'-O-methyladenosine-3'-phosphate
  modified_base 4: mod_base = OTHER; note = 2'-O-methyladenosine-3'-phosphate
  modified_base 5: mod_base = OTHER; note = 2'-O-methylguanosine-3'-phosphate
  modified_base 6: mod_base = OTHER; note = 2'-deoxy-2'-fluoroadenosine-3'-phosphate
  modified_base 7: mod_base = OTHER; note = 2'-O-methylguanosine-3'-phosphate
  modified_base 8: mod_base = OTHER; note = 2'-O-methyladenosine-3'-phosphate
  modified_base 9: mod_base = OTHER; note = 2'-O-methyladenosine-3'-phosphate
  modified_base 10: mod_base = OTHER; note = 2'-O-methyladenosine-3'-phosphate
  modified_base 11: mod_base = OTHER; note = 2'-O-methyladenosine-3'-phosphate
  modified_base 12: mod_base = OTHER; note = 2'-O-methylguanosine-3'-phosphate
  modified_base 13: mod_base = OTHER; note = 2'-O-methyluridine-3'-phosphate
  modified_base 14: mod_base = OTHER; note = 2'-deoxy-2'-fluoroadenosine-3'-phosphate
  modified_base 15: mod_base = OTHER; note = 2'-O-methyluridine-3'-phosphate
  modified_base 16: mod_base = OTHER; note = 2'-deoxy-2'-fluoroguanosine-3'-phosphate
  modified_base 17: mod_base = OTHER; note = 2'-O-methylcytidine-3'-phosphate
  modified_base 18: mod_base = OTHER; note = 2'-O-methyluridine-3'-phosphate
  modified_base 19: mod_base = OTHER; note = 2'-O-methylguanosine-3'-phosphate
  modified_base 20: mod_base = OTHER; note = 2'-O-methylguanosine-3'-phosphate
  modified_base 21: mod_base = OTHER; note = 2'-O-methylcytidine-3'-phosphorothioate
  modified_base 22: mod_base = OTHER; note = 2'-O-methyladenosine-3'-phosphorothioate
  modified_base 23: mod_base = OTHER; note = 2'-O-methylguanosine
taaagagaaaagtatgctggcag

SEQ ID NO: 13227 - RNA, 23 nt, synthetic construct
  source 1..23: mol_type = other RNA
  modified_base 1: mod_base = OTHER; note = 2'-O-methyluridine-3'-phosphorothioate 5'-(E)-Vinylphosphonate
  modified_base 2: mod_base = OTHER; note = 2'-deoxy-2'-fluoroguanosine-3'-phosphorothioate
  modified_base 3: mod_base = OTHER; note = 2'-O-methyladenosine-3'-phosphate
  modified_base 4: mod_base = OTHER; note = 2'-O-methyladenosine-3'-phosphate
  modified_base 5: mod_base = OTHER; note = 2'-O-methyladenosine-3'-phosphate
  modified_base 6: mod_base = OTHER; note = 2'-deoxy-2'-fluoroguanosine-3'-phosphate
  modified_base 7: mod_base = OTHER; note = 2'-O-methyladenosine-3'-phosphate
  modified_base 8: mod_base = OTHER; note = 2'-O-methylguanosine-3'-phosphate
  modified_base 9: mod_base = OTHER; note = 2'-O-methyladenosine-3'-phosphate
  modified_base 10: mod_base = OTHER; note = 2'-O-methyladenosine-3'-phosphate
  modified_base 11: mod_base = OTHER; note = 2'-O-methyladenosine-3'-phosphate
  modified_base 12: mod_base = OTHER; note = 2'-O-methyladenosine-3'-phosphate
  modified_base 13: mod_base = OTHER; note = 2'-O-methylguanosine-3'-phosphate
  modified_base 14: mod_base = OTHER; note = 2'-deoxy-2'-fluorouridine-3'-phosphate
  modified_base 15: mod_base = OTHER; note = 2'-O-methyladenosine-3'-phosphate
  modified_base 16: mod_base = OTHER; note = 2'-deoxy-2'-fluorouridine-3'-phosphate
  modified_base 17: mod_base = OTHER; note = 2'-O-methylguanosine-3'-phosphate
  modified_base 18: mod_base = OTHER; note = 2'-O-methylcytidine-3'-phosphate
  modified_base 19: mod_base = OTHER; note = 2'-O-methyluridine-3'-phosphate
  modified_base 20: mod_base = OTHER; note = 2'-O-methylguanosine-3'-phosphate
  modified_base 21: mod_base = OTHER; note = 2'-O-methylguanosine-3'-phosphorothioate
  modified_base 22: mod_base = OTHER; note = 2'-O-methylcytidine-3'-phosphorothioate
  modified_base 23: mod_base = OTHER; note = 2'-O-methyladenosine
tgaaagagaaaagtatgctggca

SEQ ID NO: 13228 - RNA, 23 nt, synthetic construct
  source 1..23: mol_type = other RNA
  modified_base 1: mod_base = OTHER; note = 2'-O-methyluridine-3'-phosphorothioate 5'-(E)-Vinylphosphonate
  modified_base 2: mod_base = OTHER; note = 2'-deoxy-2'-fluorouridine-3'-phosphorothioate
  modified_base 3: mod_base = OTHER; note = 2'-O-methylguanosine-3'-phosphate
  modified_base 4: mod_base = OTHER; note = 2'-O-methyladenosine-3'-phosphate
  modified_base 5: mod_base = OTHER; note = 2'-O-methyladenosine-3'-phosphate
  modified_base 6: mod_base = OTHER; note = 2'-deoxy-2'-fluoroadenosine-3'-phosphate
  modified_base 7: mod_base = OTHER; note = 2'-O-methylguanosine-3'-phosphate
  modified_base 8: mod_base = OTHER; note = 2'-O-methyladenosine-3'-phosphate
  modified_base 9: mod_base = OTHER; note = 2'-O-methylguanosine-3'-phosphate
  modified_base 10: mod_base = OTHER; note = 2'-O-methyladenosine-3'-phosphate
  modified_base 11: mod_base = OTHER; note = 2'-O-methyladenosine-3'-phosphate
  modified_base 12: mod_base = OTHER; note = 2'-O-methyladenosine-3'-phosphate
  modified_base 13: mod_base = OTHER; note = 2'-O-methyladenosine-3'-phosphate
  modified_base 14: mod_base = OTHER; note = 2'-deoxy-2'-fluoroguanosine-3'-phosphate
  modified_base 15: mod_base = OTHER; note = 2'-O-methyluridine-3'-phosphate
  modified_base 16: mod_base = OTHER; note = 2'-deoxy-2'-fluoroadenosine-3'-phosphate
  modified_base 17: mod_base = OTHER; note = 2'-O-methyluridine-3'-phosphate
  modified_base 18: mod_base = OTHER; note = 2'-O-methylguanosine-3'-phosphate
  modified_base 19: mod_base = OTHER; note = 2'-O-methylcytidine-3'-phosphate
  modified_base 20: mod_base = OTHER; note = 2'-O-methyluridine-3'-phosphate
  modified_base 21: mod_base = OTHER; note = 2'-O-methylguanosine-3'-phosphorothioate
  modified_base 22: mod_base = OTHER; note = 2'-O-methylguanosine-3'-phosphorothioate
  modified_base 23: mod_base = OTHER; note = 2'-O-methylcytidine
ttgaaagagaaaagtatgctggc

SEQ ID NO: 13229 - RNA, 23 nt, synthetic construct
  source 1..23: mol_type = other RNA
  modified_base 1: mod_base = OTHER; note = 2'-O-methyluridine-3'-phosphorothioate 5'-(E)-Vinylphosphonate
  modified_base 2: mod_base = OTHER; note = 2'-deoxy-2'-fluorocytidine-3'-phosphorothioate
  modified_base 3: mod_base = OTHER; note = 2'-O-methyluridine-3'-phosphate
  modified_base 4: mod_base = OTHER; note = 2'-O-methylguanosine-3'-phosphate
  modified_base 5: mod_base = OTHER; note = 2'-O-methyladenosine-3'-phosphate
  modified_base 6: mod_base = OTHER; note = 2'-deoxy-2'-fluoroadenosine-3'-phosphate
  modified_base 7: mod_base = OTHER; note = 2'-O-methyladenosine-3'-phosphate
  modified_base 8: mod_base = OTHER; note = 2'-O-methylguanosine-3'-phosphate
  modified_base 9: mod_base = OTHER; note = 2'-O-methyladenosine-3'-phosphate
  modified_base 10: mod_base = OTHER; note = 2'-O-methylguanosine-3'-phosphate
  modified_base 11: mod_base = OTHER; note = 2'-O-methyladenosine-3'-phosphate
  modified_base 12: mod_base = OTHER; note = 2'-O-methyladenosine-3'-phosphate
  modified_base 13: mod_base = OTHER; note = 2'-O-methyladenosine-3'-phosphate
  modified_base 14: mod_base = OTHER; note = 2'-deoxy-2'-fluoroadenosine-3'-phosphate
  modified_base 15: mod_base = OTHER; note = 2'-O-methylguanosine-3'-phosphate
  modified_base 16: mod_base = OTHER; note = 2'-deoxy-2'-fluorouridine-3'-phosphate
  modified_base 17: mod_base = OTHER; note = 2'-O-methyladenosine-3'-phosphate
  modified_base 18: mod_base = OTHER; note = 2'-O-methyluridine-3'-phosphate
  modified_base 19: mod_base = OTHER; note = 2'-O-methylguanosine-3'-phosphate
  modified_base 20: mod_base = OTHER; note = 2'-O-methylcytidine-3'-phosphate
  modified_base 21: mod_base = OTHER; note = 2'-O-methyluridine-3'-phosphorothioate
  modified_base 22: mod_base = OTHER; note = 2'-O-methylguanosine-3'-phosphorothioate
  modified_base 23: mod_base = OTHER; note = 2'-O-methylguanosine
tctgaaagagaaaagtatgctgg

SEQ ID NO: 13230 - RNA, 23 nt, synthetic construct
  source 1..23: mol_type = other RNA
  modified_base 1: mod_base = OTHER; note = 2'-O-methyluridine-3'-phosphorothioate 5'-(E)-Vinylphosphonate
  modified_base 2: mod_base = OTHER; note = 2'-deoxy-2'-fluoroadenosine-3'-phosphorothioate
  modified_base 3: mod_base = OTHER; note = 2'-O-methylcytidine-3'-phosphate
  modified_base 4: mod_base = OTHER; note = 2'-O-methyluridine-3'-phosphate
  modified_base 5: mod_base = OTHER; note = 2'-O-methylguanosine-3'-phosphate
  modified_base 6: mod_base = OTHER; note = 2'-deoxy-2'-fluoroadenosine-3'-phosphate
  modified_base 7: mod_base = OTHER; note = 2'-O-methyladenosine-3'-phosphate
  modified_base 8: mod_base = OTHER; note = 2'-O-methyladenosine-3'-phosphate
  modified_base 9: mod_base = OTHER; note = 2'-O-methylguanosine-3'-phosphate
  modified_base 10: mod_base = OTHER; note = 2'-O-methyladenosine-3'-phosphate
  modified_base 11: mod_base = OTHER; note = 2'-O-methylguanosine-3'-phosphate
  modified_base 12: mod_base = OTHER; note = 2'-O-methyladenosine-3'-phosphate
  modified_base 13: mod_base = OTHER; note = 2'-O-methyladenosine-3'-phosphate
  modified_base 14: mod_base = OTHER; note = 2'-deoxy-2'-fluoroadenosine-3'-phosphate
  modified_base 15: mod_base = OTHER; note = 2'-O-methyladenosine-3'-phosphate
  modified_base 16: mod_base = OTHER; note = 2'-deoxy-2'-fluoroguanosine-3'-phosphate
  modified_base 17: mod_base = OTHER; note = 2'-O-methyluridine-3'-phosphate
  modified_base 18: mod_base = OTHER; note = 2'-O-methyladenosine-3'-phosphate
  modified_base 19: mod_base = OTHER; note = 2'-O-methyluridine-3'-phosphate
  modified_base 20: mod_base = OTHER; note = 2'-O-methylguanosine-3'-phosphate
  modified_base 21: mod_base = OTHER; note = 2'-O-methylcytidine-3'-phosphorothioate
  modified_base 22: mod_base = OTHER; note = 2'-O-methyluridine-3'-phosphorothioate
  modified_base 23: mod_base = OTHER; note = 2'-O-methylguanosine
tactgaaagagaaaagtatgctg

SEQ ID NO: 13231 - RNA, 23 nt, synthetic construct
  source 1..23: mol_type = other RNA
  modified_base 1: mod_base = OTHER; note = 2'-O-methyluridine-3'-phosphorothioate 5'-(E)-Vinylphosphonate
  modified_base 2: mod_base = OTHER; note = 2'-deoxy-2'-fluoroadenosine-3'-phosphorothioate
  modified_base 3: mod_base = OTHER; note = 2'-O-methyladenosine-3'-phosphate
  modified_base 4: mod_base = OTHER; note = 2'-O-methylcytidine-3'-phosphate
  modified_base 5: mod_base = OTHER; note = 2'-O-methyluridine-3'-phosphate
  modified_base 6: mod_base = OTHER; note = 2'-deoxy-2'-fluoroguanosine-3'-phosphate
  modified_base 7: mod_base = OTHER; note = 2'-O-methyladenosine-3'-phosphate
  modified_base 8: mod_base = OTHER; note = 2'-O-methyladenosine-3'-phosphate
  modified_base 9: mod_base = OTHER; note = 2'-O-methyladenosine-3'-phosphate
  modified_base 10: mod_base = OTHER; note = 2'-O-methylguanosine-3'-phosphate
  modified_base 11: mod_base = OTHER; note = 2'-O-methyladenosine-3'-phosphate
  modified_base 12: mod_base = OTHER; note = 2'-O-methylguanosine-3'-phosphate
  modified_base 13: mod_base = OTHER; note = 2'-O-methyladenosine-3'-phosphate
  modified_base 14: mod_base = OTHER; note = 2'-deoxy-2'-fluoroadenosine-3'-phosphate
  modified_base 15: mod_base = OTHER; note = 2'-O-methyladenosine-3'-phosphate
  modified_base 16: mod_base = OTHER; note = 2'-deoxy-2'-fluoroadenosine-3'-phosphate
  modified_base 17: mod_base = OTHER; note = 2'-O-methylguanosine-3'-phosphate
  modified_base 18: mod_base = OTHER; note = 2'-O-methyluridine-3'-phosphate
  modified_base 19: mod_base = OTHER; note = 2'-O-methyladenosine-3'-phosphate
  modified_base 20: mod_base = OTHER; note = 2'-O-methyluridine-3'-phosphate
  modified_base 21: mod_base = OTHER; note = 2'-O-methylguanosine-3'-phosphorothioate
  modified_base 22: mod_base = OTHER; note = 2'-O-methylcytidine-3'-phosphorothioate
  modified_base 23: mod_base = OTHER; note = 2'-O-methyluridine
taactgaaagagaaaagtatgct

SEQ ID NO: 13232 - RNA, 23 nt, synthetic construct
  source 1..23: mol_type = other RNA
  modified_base 1: mod_base = OTHER; note = 2'-O-methyluridine-3'-phosphorothioate 5'-(E)-Vinylphosphonate
  modified_base 2: mod_base = OTHER; note = 2'-deoxy-2'-fluorocytidine-3'-phosphorothioate
  modified_base 3: mod_base = OTHER; note = 2'-O-methyladenosine-3'-phosphate
  modified_base 4: mod_base = OTHER; note = 2'-O-methyladenosine-3'-phosphate
  modified_base 5: mod_base = OTHER; note = 2'-O-methylcytidine-3'-phosphate
  modified_base 6: mod_base = OTHER; note = 2'-deoxy-2'-fluorouridine-3'-phosphate
  modified_base 7: mod_base = OTHER; note = 2'-O-methylguanosine-3'-phosphate
  modified_base 8: mod_base = OTHER; note = 2'-O-methyladenosine-3'-phosphate
  modified_base 9: mod_base = OTHER; note = 2'-O-methyladenosine-3'-phosphate
  modified_base 10: mod_base = OTHER; note = 2'-O-methyladenosine-3'-phosphate
  modified_base 11: mod_base = OTHER; note = 2'-O-methylguanosine-3'-phosphate
  modified_base 12: mod_base = OTHER; note = 2'-O-methyladenosine-3'-phosphate
  modified_base 13: mod_base = OTHER; note = 2'-O-methylguanosine-3'-phosphate
  modified_base 14: mod_base = OTHER; note = 2'-deoxy-2'-fluoroadenosine-3'-phosphate
  modified_base 15: mod_base = OTHER; note = 2'-O-methyladenosine-3'-phosphate
  modified_base 16: mod_base = OTHER; note = 2'-deoxy-2'-fluoroadenosine-3'-phosphate
  modified_base 17: mod_base = OTHER; note = 2'-O-methyladenosine-3'-phosphate
  modified_base 18: mod_base = OTHER; note = 2'-O-methylguanosine-3'-phosphate
  modified_base 19: mod_base = OTHER; note = 2'-O-methyluridine-3'-phosphate
  modified_base 20: mod_base = OTHER; note = 2'-O-methyladenosine-3'-phosphate
  modified_base 21: mod_base = OTHER; note = 2'-O-methyluridine-3'-phosphorothioate
  modified_base 22: mod_base = OTHER; note = 2'-O-methylguanosine-3'-phosphorothioate
  modified_base 23: mod_base = OTHER; note = 2'-O-methylcytidine
tcaactgaaagagaaaagtatgc

SEQ ID NO: 13233 - RNA, 23 nt, synthetic construct
  source 1..23: mol_type = other RNA
  modified_base 1: mod_base = OTHER; note = 2'-O-methyluridine-3'-phosphorothioate 5'-(E)-Vinylphosphonate
  modified_base 2: mod_base = OTHER; note = 2'-deoxy-2'-fluoroadenosine-3'-phosphorothioate
  modified_base 3: mod_base = OTHER; note = 2'-O-methylcytidine-3'-phosphate
  modified_base 4: mod_base = OTHER; note = 2'-O-methyladenosine-3'-phosphate
  modified_base 5: mod_base = OTHER; note = 2'-O-methyladenosine-3'-phosphate
  modified_base 6: mod_base = OTHER; note = 2'-deoxy-2'-fluorocytidine-3'-phosphate
  modified_base 7: mod_base = OTHER; note = 2'-O-methyluridine-3'-phosphate
  modified_base 8: mod_base = OTHER; note = 2'-O-methylguanosine-3'-phosphate
  modified_base 9: mod_base = OTHER; note = 2'-O-methyladenosine-3'-phosphate
  modified_base 10: mod_base = OTHER; note = 2'-O-methyladenosine-3'-phosphate
  modified_base 11: mod_base = OTHER; note = 2'-O-methyladenosine-3'-phosphate
  modified_base 12: mod_base = OTHER; note = 2'-O-methylguanosine-3'-phosphate
  modified_base 13: mod_base = OTHER; note = 2'-O-methyladenosine-3'-phosphate
  modified_base 14: mod_base = OTHER; note = 2'-deoxy-2'-fluoroguanosine-3'-phosphate
  modified_base 15: mod_base = OTHER; note = 2'-O-methyladenosine-3'-phosphate
  modified_base 16: mod_base = OTHER; note = 2'-deoxy-2'-fluoroadenosine-3'-phosphate
  modified_base 17: mod_base = OTHER; note = 2'-O-methyladenosine-3'-phosphate
  modified_base 18: mod_base = OTHER; note = 2'-O-methyladenosine-3'-phosphate
  modified_base 19: mod_base = OTHER; note = 2'-O-methylguanosine-3'-phosphate
  modified_base 20: mod_base = OTHER; note = 2'-O-methyluridine-3'-phosphate
  modified_base 21: mod_base = OTHER; note = 2'-O-methyladenosine-3'-phosphorothioate
  modified_base 22: mod_base = OTHER; note = 2'-O-methyluridine-3'-phosphorothioate
  modified_base 23: mod_base = OTHER; note = 2'-O-methylguanosine
tacaactgaaagagaaaagtatg

SEQ ID NO: 13234 - RNA, 23 nt, synthetic construct
  source 1..23: mol_type = other RNA
  modified_base 1: mod_base = OTHER; note = 2'-O-methyluridine-3'-phosphorothioate 5'-(E)-Vinylphosphonate
  modified_base 2: mod_base = OTHER; note = 2'-deoxy-2'-fluoroadenosine-3'-phosphorothioate
  modified_base 3: mod_base = OTHER; note = 2'-O-methyluridine-3'-phosphate
  modified_base 4: mod_base = OTHER; note = 2'-O-methylguanosine-3'-phosphate
  modified_base 5: mod_base = OTHER; note = 2'-O-methyluridine-3'-phosphate
  modified_base 6: mod_base = OTHER; note = 2'-deoxy-2'-fluoroadenosine-3'-phosphate
  modified_base 7: mod_base = OTHER; note = 2'-O-methyluridine-3'-phosphate
  modified_base 8: mod_base = OTHER; note = 2'-O-methyluridine-3'-phosphate
  modified_base 9: mod_base = OTHER; note = 2'-O-methylcytidine-3'-phosphate
  modified_base 10: mod_base = OTHER; note = 2'-O-methyladenosine-3'-phosphate
  modified_base 11: mod_base = OTHER; note = 2'-O-methyluridine-3'-phosphate
  modified_base 12: mod_base = OTHER; note = 2'-O-methylcytidine-3'-phosphate
  modified_base 13: mod_base = OTHER; note = 2'-O-methyluridine-3'-phosphate
  modified_base 14: mod_base = OTHER; note = 2'-deoxy-2'-fluoroadenosine-3'-phosphate
  modified_base 15: mod_base = OTHER; note = 2'-O-methylcytidine-3'-phosphate
  modified_base 16: mod_base = OTHER; note = 2'-deoxy-2'-fluoroadenosine-3'-phosphate
  modified_base 17: mod_base = OTHER; note = 2'-O-methyladenosine-3'-phosphate
  modified_base 18: mod_base = OTHER; note = 2'-O-methylcytidine-3'-phosphate
  modified_base 19: mod_base = OTHER; note = 2'-O-methyluridine-3'-phosphate
  modified_base 20: mod_base = OTHER; note = 2'-O-methylguanosine-3'-phosphate
  modified_base 21: mod_base = OTHER; note = 2'-O-methyladenosine-3'-phosphorothioate
  modified_base 22: mod_base = OTHER; note = 2'-O-methyladenosine-3'-phosphorothioate
  modified_base 23: mod_base = OTHER; note = 2'-O-methyladenosine
tatgtattcatctacaactgaaa

SEQ ID NO: 13235 - RNA, 23 nt, synthetic construct
  source 1..23: mol_type = other RNA
  modified_base 1: mod_base = OTHER; note = 2'-O-methyluridine-3'-phosphorothioate 5'-(E)-Vinylphosphonate
  modified_base 2: mod_base = OTHER; note = 2'-deoxy-2'-fluoroadenosine-3'-phosphorothioate
  modified_base 3: mod_base = OTHER; note = 2'-O-methyladenosine-3'-phosphate
  modified_base 4: mod_base = OTHER; note = 2'-O-methyluridine-3'-phosphate
  modified_base 5: mod_base = OTHER; note = 2'-O-methylguanosine-3'-phosphate
  modified_base 6: mod_base = OTHER; note = 2'-deoxy-2'-fluorouridine-3'-phosphate
  modified_base 7: mod_base = OTHER; note = 2'-O-methyladenosine-3'-phosphate
  modified_base 8: mod_base = OTHER; note = 2'-O-methyluridine-3'-phosphate
  modified_base 9: mod_base = OTHER; note = 2'-O-methyluridine-3'-phosphate
  modified_base 10: mod_base = OTHER; note = 2'-O-methylcytidine-3'-phosphate
  modified_base 11: mod_base = OTHER; note = 2'-O-methyladenosine-3'-phosphate
  modified_base 12: mod_base = OTHER; note = 2'-O-methyluridine-3'-phosphate
  modified_base 13: mod_base = OTHER; note = 2'-O-methylcytidine-3'-phosphate
  modified_base 14: mod_base = OTHER; note = 2'-deoxy-2'-fluorouridine-3'-phosphate
  modified_base 15: mod_base = OTHER; note = 2'-O-methyladenosine-3'-phosphate
  modified_base 16: mod_base = OTHER; note = 2'-deoxy-2'-fluorocytidine-3'-phosphate
  modified_base 17: mod_base = OTHER; note = 2'-O-methyladenosine-3'-phosphate
  modified_base 18: mod_base = OTHER; note = 2'-O-methyladenosine-3'-phosphate
  modified_base 19: mod_base = OTHER; note = 2'-O-methylcytidine-3'-phosphate
  modified_base 20: mod_base = OTHER; note = 2'-O-methyluridine-3'-phosphate
  modified_base 21: mod_base = OTHER; note = 2'-O-methylguanosine-3'-phosphorothioate
  modified_base 22: mod_base = OTHER; note = 2'-O-methyladenosine-3'-phosphorothioate
  modified_base 23: mod_base = OTHER; note = 2'-O-methyladenosine
taatgtattcatctacaactgaa

SEQ ID NO: 13236 - RNA, 23 nt, synthetic construct
  source 1..23: mol_type = other RNA
  modified_base 1: mod_base = OTHER; note = 2'-O-methyluridine-3'-phosphorothioate 5'-(E)-Vinylphosphonate
  modified_base 2: mod_base = OTHER; note = 2'-deoxy-2'-fluoroadenosine-3'-phosphorothioate
  modified_base 3: mod_base = OTHER; note = 2'-O-methyluridine-3'-phosphate
  modified_base 4: mod_base = OTHER; note = 2'-O-methylguanosine-3'-phosphate
  modified_base 5: mod_base = OTHER; note = 2'-O-methyladenosine-3'-phosphate
  modified_base 6: mod_base = OTHER; note = 2'-deoxy-2'-fluorouridine-3'-phosphate
  modified_base 7: mod_base = OTHER; note = 2'-O-methylcytidine-3'-phosphate
  modified_base 8: mod_base = OTHER; note = 2'-O-methyladenosine-3'-phosphate
  modified_base 9: mod_base = OTHER; note = 2'-O-methylguanosine-3'-phosphate
  modified_base 10: mod_base = OTHER; note = 2'-O-methylguanosine-3'-phosphate
  modified_base 11: mod_base = OTHER; note = 2'-O-methyladenosine-3'-phosphate
  modified_base 12: mod_base = OTHER; note = 2'-O-methyladenosine-3'-phosphate
  modified_base 13: mod_base = OTHER; note = 2'-O-methyladenosine-3'-phosphate
  modified_base 14: mod_base = OTHER; note = 2'-deoxy-2'-fluorouridine-3'-phosphate
  modified_base 15: mod_base = OTHER; note = 2'-O-methyladenosine-3'-phosphate
  modified_base 16: mod_base = OTHER; note = 2'-deoxy-2'-fluorocytidine-3'-phosphate
  modified_base 17: mod_base = OTHER; note = 2'-O-methyladenosine-3'-phosphate
  modified_base 18: mod_base = OTHER; note = 2'-O-methylguanosine-3'-phosphate
  modified_base 19: mod_base = OTHER; note = 2'-O-methyluridine-3'-phosphate
  modified_base 20: mod_base = OTHER; note = 2'-O-methylcytidine-3'-phosphate
  modified_base 21: mod_base = OTHER; note = 2'-O-methyladenosine-3'-phosphorothioate
  modified_base 22: mod_base = OTHER; note = 2'-O-methylcytidine-3'-phosphorothioate
  modified_base 23: mod_base = OTHER; note = 2'-O-methyladenosine
tatgatcaggaaatacagtcaca

SEQ ID NO: 13237 - RNA, 23 nt, synthetic construct
  source 1..23: mol_type = other RNA
  modified_base 1: mod_base = OTHER; note = 2'-O-methyluridine-3'-phosphorothioate 5'-(E)-Vinylphosphonate
  modified_base 2: mod_base = OTHER; note = 2'-deoxy-2'-fluoroadenosine-3'-phosphorothioate
  modified_base 3: mod_base = OTHER; note = 2'-O-methyladenosine-3'-phosphate
  modified_base 4: mod_base = OTHER; note = 2'-O-methyluridine-3'-phosphate
  modified_base 5: mod_base = OTHER; note = 2'-O-methyladenosine-3'-phosphate
  modified_base 6: mod_base = OTHER; note = 2'-deoxy-2'-fluorocytidine-3'-phosphate
  modified_base 7: mod_base = OTHER; note = 2'-O-methyladenosine-3'-phosphate
  modified_base 8: mod_base = OTHER; note = 2'-O-methylguanosine-3'-phosphate
  modified_base 9: mod_base = OTHER; note = 2'-O-methyluridine-3'-phosphate
  modified_base 10: mod_base = OTHER; note = 2'-O-methylcytidine-3'-phosphate
  modified_base 11: mod_base = OTHER; note = 2'-O-methyladenosine-3'-phosphate
  modified_base 12: mod_base = OTHER; note = 2'-O-methylcytidine-3'-phosphate
  modified_base 13: mod_base = OTHER; note = 2'-O-methyladenosine-3'-phosphate
  modified_base 14: mod_base = OTHER; note = 2'-deoxy-2'-fluorouridine-3'-phosphate
  modified_base 15: mod_base = OTHER; note = 2'-O-methylcytidine-3'-phosphate
  modified_base 16: mod_base = OTHER; note = 2'-deoxy-2'-fluorouridine-3'-phosphate
  modified_base 17: mod_base = OTHER; note = 2'-O-methylguanosine-3'-phosphate
  modified_base 18: mod_base = OTHER; note = 2'-O-methyladenosine-3'-phosphate
  modified_base 19: mod_base = OTHER; note = 2'-O-methyladenosine-3'-phosphate
  modified_base 20: mod_base = OTHER; note = 2'-O-methyladenosine-3'-phosphate
  modified_base 21: mod_base = OTHER; note = 2'-O-methyladenosine-3'-phosphorothioate
  modified_base 22: mod_base = OTHER; note = 2'-O-methyluridine-3'-phosphorothioate
  modified_base 23: mod_base = OTHER; note = 2'-O-methyladenosine
taatacagtcacatctgaaaata

SEQ ID NO: 13238 - RNA, 23 nt, synthetic construct
  source 1..23: mol_type = other RNA
  modified_base 1: mod_base = OTHER; note = 2'-O-methyluridine-3'-phosphorothioate 5'-(E)-Vinylphosphonate
  modified_base 2: mod_base = OTHER; note = 2'-deoxy-2'-fluoroadenosine-3'-phosphorothioate
  modified_base 3: mod_base = OTHER; note = 2'-O-methyladenosine-3'-phosphate
  modified_base 4: mod_base = OTHER; note = 2'-O-methyladenosine-3'-phosphate
  modified_base 5: mod_base = OTHER; note = 2'-O-methyluridine-3'-phosphate
  modified_base 6: mod_base = OTHER; note = 2'-deoxy-2'-fluoroadenosine-3'-phosphate
  modified_base 7: mod_base = OTHER; note = 2'-O-methylcytidine-3'-phosphate
  modified_base 8: mod_base = OTHER; note = 2'-O-methyladenosine-3'-phosphate
  modified_base 9: mod_base = OTHER; note = 2'-O-methylguanosine-3'-phosphate
  modified_base 10: mod_base = OTHER; note = 2'-O-methyluridine-3'-phosphate
  modified_base 11: mod_base = OTHER; note = 2'-O-methylcytidine-3'-phosphate
  modified_base 12: mod_base = OTHER; note = 2'-O-methyladenosine-3'-phosphate
  modified_base 13: mod_base = OTHER; note = 2'-O-methylcytidine-3'-phosphate
  modified_base 14: mod_base = OTHER; note = 2'-deoxy-2'-fluoroadenosine-3'-phosphate
  modified_base 15: mod_base = OTHER; note = 2'-O-methyluridine-3'-phosphate
  modified_base 16: mod_base = OTHER; note = 2'-deoxy-2'-fluorocytidine-3'-phosphate
  modified_base 17: mod_base = OTHER; note = 2'-O-methyluridine-3'-phosphate
  modified_base 18: mod_base = OTHER; note = 2'-O-methylguanosine-3'-phosphate
  modified_base 19: mod_base = OTHER; note = 2'-O-methyladenosine-3'-phosphate
  modified_base 20: mod_base = OTHER; note = 2'-O-methyladenosine-3'-phosphate
  modified_base 21: mod_base = OTHER; note = 2'-O-methyladenosine-3'-phosphorothioate
  modified_base 22: mod_base = OTHER; note = 2'-O-methyladenosine-3'-phosphorothioate
  modified_base 23: mod_base = OTHER; note = 2'-O-methyluridine
taaatacagtcacatctgaaaat

SEQ ID NO: 13239 - RNA, 23 nt, synthetic construct
  source 1..23: mol_type = other RNA
  modified_base 1: mod_base = OTHER; note = 2'-O-methyluridine-3'-phosphorothioate 5'-(E)-Vinylphosphonate
  modified_base 2: mod_base = OTHER; note = 2'-deoxy-2'-fluoroguanosine-3'-phosphorothioate
  modified_base 3: mod_base = OTHER; note = 2'-O-methyladenosine-3'-phosphate
  modified_base 4: mod_base = OTHER; note = 2'-O-methyladenosine-3'-phosphate
  modified_base 5: mod_base = OTHER; note = 2'-O-methyladenosine-3'-phosphate
  modified_base 6: mod_base = OTHER; note = 2'-deoxy-2'-fluorouridine-3'-phosphate
  modified_base 7: mod_base = OTHER; note = 2'-O-methyladenosine-3'-phosphate
  modified_base 8: mod_base = OTHER; note = 2'-O-methylcytidine-3'-phosphate
  modified_base 9: mod_base = OTHER; note = 2'-O-methyladenosine-3'-phosphate
  modified_base 10: mod_base = OTHER; note = 2'-O-methylguanosine-3'-phosphate
  modified_base 11: mod_base = OTHER; note = 2'-O-methyluridine-3'-phosphate
  modified_base 12: mod_base = OTHER; note = 2'-O-methylcytidine-3'-phosphate
  modified_base 13: mod_base = OTHER; note = 2'-O-methyladenosine-3'-phosphate
  modified_base 14: mod_base = OTHER; note = 2'-deoxy-2'-fluorocytidine-3'-phosphate
  modified_base 15: mod_base = OTHER; note = 2'-O-methyladenosine-3'-phosphate
  modified_base 16: mod_base = OTHER; note = 2'-deoxy-2'-fluorouridine-3'-phosphate
  modified_base 17: mod_base = OTHER; note = 2'-O-methylcytidine-3'-phosphate
  modified_base 18: mod_base = OTHER; note = 2'-O-methyluridine-3'-phosphate
  modified_base 19: mod_base = OTHER; note = 2'-O-methylguanosine-3'-phosphate
  modified_base 20: mod_base = OTHER; note = 2'-O-methyladenosine-3'-phosphate
  modified_base 21: mod_base = OTHER; note = 2'-O-methyladenosine-3'-phosphorothioate
  modified_base 22: mod_base = OTHER; note = 2'-O-methyladenosine-3'-phosphorothioate
  modified_base 23: mod_base = OTHER; note = 2'-O-methyladenosine
tgaaatacagtcacatctgaaaa

SEQ ID NO: 13240 - RNA, 23 nt, synthetic construct
  source 1..23: mol_type = other RNA
  modified_base 1: mod_base = OTHER; note = 2'-O-methyluridine-3'-phosphorothioate 5'-(E)-Vinylphosphonate
  modified_base 2: mod_base = OTHER; note = 2'-deoxy-2'-fluoroguanosine-3'-phosphorothioate
  modified_base 3: mod_base = OTHER; note = 2'-O-methylguanosine-3'-phosphate
  modified_base 4: mod_base = OTHER; note = 2'-O-methyladenosine-3'-phosphate
  modified_base 5: mod_base = OTHER; note = 2'-O-methyladenosine-3'-phosphate
  modified_base 6: mod_base = OTHER; note = 2'-deoxy-2'-fluoroadenosine-3'-phosphate
  modified_base 7: mod_base = OTHER; note = 2'-O-methyluridine-3'-phosphate
  modified_base 8: mod_base = OTHER; note = 2'-O-methyladenosine-3'-phosphate
  modified_base 9: mod_base = OTHER; note = 2'-O-methylcytidine-3'-phosphate
  modified_base 10: mod_base = OTHER; note = 2'-O-methyladenosine-3'-phosphate
  modified_base 11: mod_base = OTHER; note = 2'-O-methylguanosine-3'-phosphate
  modified_base 12: mod_base = OTHER; note = 2'-O-methyluridine-3'-phosphate
  modified_base 13: mod_base = OTHER; note = 2'-O-methylcytidine-3'-phosphate
  modified_base 14: mod_base = OTHER; note = 2'-deoxy-2'-fluoroadenosine-3'-phosphate
  modified_base 15: mod_base = OTHER; note = 2'-O-methylcytidine-3'-phosphate
  modified_base 16: mod_base = OTHER; note = 2'-deoxy-2'-fluoroadenosine-3'-phosphate
  modified_base 17: mod_base = OTHER; note = 2'-O-methyluridine-3'-phosphate
  modified_base 18: mod_base = OTHER; note = 2'-O-methylcytidine-3'-phosphate
  modified_base 19: mod_base = OTHER; note = 2'-O-methyluridine-3'-phosphate
  modified_base 20: mod_base = OTHER; note = 2'-O-methylguanosine-3'-phosphate
  modified_base 21: mod_base = OTHER; note = 2'-O-methyladenosine-3'-phosphorothioate
  modified_base 22: mod_base = OTHER; note = 2'-O-methyladenosine-3'-phosphorothioate
  modified_base 23: mod_base = OTHER; note = 2'-O-methyladenosine
tggaaatacagtcacatctgaaa

SEQ ID NO: 13241 - RNA, 23 nt, synthetic construct
  source 1..23: mol_type = other RNA
  modified_base 1: mod_base = OTHER; note = 2'-O-methyluridine-3'-phosphorothioate 5'-(E)-Vinylphosphonate
  modified_base 2: mod_base = OTHER; note = 2'-deoxy-2'-fluoroadenosine-3'-phosphorothioate
  modified_base 3: mod_base = OTHER; note = 2'-O-methylguanosine-3'-phosphate
  modified_base 4: mod_base = OTHER; note = 2'-O-methylguanosine-3'-phosphate
  modified_base 5: mod_base = OTHER; note = 2'-O-methyladenosine-3'-phosphate
  modified_base 6: mod_base = OTHER; note = 2'-deoxy-2'-fluoroadenosine-3'-phosphate
  modified_base 7: mod_base = OTHER; note = 2'-O-methyladenosine-3'-phosphate
  modified_base 8: mod_base = OTHER; note = 2'-O-methyluridine-3'-phosphate
  modified_base 9: mod_base = OTHER; note = 2'-O-methyladenosine-3'-phosphate
  modified_base 10: mod_base = OTHER; note = 2'-O-methylcytidine-3'-phosphate
  modified_base 11: mod_base = OTHER; note = 2'-O-methyladenosine-3'-phosphate
  modified_base 12: mod_base = OTHER; note = 2'-O-methylguanosine-3'-phosphate
  modified_base 13: mod_base = OTHER; note = 2'-O-methyluridine-3'-phosphate
  modified_base 14: mod_base = OTHER; note = 2'-deoxy-2'-fluorocytidine-3'-phosphate
  modified_base 15: mod_base = OTHER; note = 2'-O-methyladenosine-3'-phosphate
  modified_base 16: mod_base = OTHER; note = 2'-deoxy-2'-fluorocytidine-3'-phosphate
  modified_base 17: mod_base = OTHER; note = 2'-O-methyladenosine-3'-phosphate
  modified_base 18: mod_base = OTHER; note = 2'-O-methyluridine-3'-phosphate
  modified_base 19: mod_base = OTHER; note = 2'-O-methylcytidine-3'-phosphate
  modified_base 20: mod_base = OTHER; note = 2'-O-methyluridine-3'-phosphate
  modified_base 21: mod_base = OTHER; note = 2'-O-methylguanosine-3'-phosphorothioate
  modified_base 22: mod_base = OTHER; note = 2'-O-methyladenosine-3'-phosphorothioate
  modified_base 23: mod_base = OTHER; note = 2'-O-methyladenosine
taggaaatacagtcacatctgaa

SEQ ID NO: 13242 - RNA, 23 nt, synthetic construct
  source 1..23: mol_type = other RNA
  modified_base 1: mod_base = OTHER; note = 2'-O-methyluridine-3'-phosphorothioate 5'-(E)-Vinylphosphonate
  modified_base 2: mod_base = OTHER; note = 2'-deoxy-2'-fluorocytidine-3'-phosphorothioate
  modified_base 3: mod_base = OTHER; note = 2'-O-methyladenosine-3'-phosphate
  modified_base 4: mod_base = OTHER; note = 2'-O-methylguanosine-3'-phosphate
  modified_base 5: mod_base = OTHER; note = 2'-O-methylguanosine-3'-phosphate
  modified_base 6: mod_base = OTHER; note = 2'-deoxy-2'-fluoroadenosine-3'-phosphate
  modified_base 7: mod_base = OTHER; note = 2'-O-methyladenosine-3'-phosphate
  modified_base 8: mod_base = OTHER; note = 2'-O-methyladenosine-3'-phosphate
  modified_base 9: mod_base = OTHER; note = 2'-O-methyluridine-3'-phosphate
  modified_base 10: mod_base = OTHER; note = 2'-O-methyladenosine-3'-phosphate
  modified_base 11: mod_base = OTHER; note = 2'-O-methylcytidine-3'-phosphate
  modified_base 12: mod_base = OTHER; note = 2'-O-methyladenosine-3'-phosphate
  modified_base 13: mod_base = OTHER; note = 2'-O-methylguanosine-3'-phosphate
  modified_base 14: mod_base = OTHER; note = 2'-deoxy-2'-fluorouridine-3'-phosphate
  modified_base 15: mod_base = OTHER; note = 2'-O-methylcytidine-3'-phosphate
  modified_base 16: mod_base = OTHER; note = 2'-deoxy-2'-fluoroadenosine-3'-phosphate
  modified_base 17: mod_base = OTHER; note = 2'-O-methylcytidine-3'-phosphate
  modified_base 18: mod_base = OTHER; note = 2'-O-methyladenosine-3'-phosphate
  modified_base 19: mod_base = OTHER; note = 2'-O-methyluridine-3'-phosphate
  modified_base 20: mod_base = OTHER; note = 2'-O-methylcytidine-3'-phosphate
  modified_base 21: mod_base = OTHER; note = 2'-O-methyluridine-3'-phosphorothioate
  modified_base 22: mod_base = OTHER; note = 2'-O-methylguanosine-3'-phosphorothioate
  modified_base 23: mod_base = OTHER; note = 2'-O-methyladenosine
tcaggaaatacagtcacatctga

SEQ ID NO: 13243 - RNA, 23 nt, synthetic construct
  source 1..23: mol_type = other RNA
  modified_base 1: mod_base = OTHER; note = 2'-O-methyluridine-3'-phosphorothioate 5'-(E)-Vinylphosphonate
  modified_base 2: mod_base = OTHER; note = 2'-deoxy-2'-fluorouridine-3'-phosphorothioate
  modified_base 3: mod_base = OTHER; note = 2'-O-methylcytidine-3'-phosphate
  modified_base 4: mod_base = OTHER; note = 2'-O-methyladenosine-3'-phosphate
  modified_base 5: mod_base = OTHER; note = 2'-O-methylguanosine-3'-phosphate
  modified_base 6: mod_base = OTHER; note = 2'-deoxy-2'-fluoroguanosine-3'-phosphate
  modified_base 7: mod_base = OTHER; note = 2'-O-methyladenosine-3'-phosphate
  modified_base 8: mod_base = OTHER; note = 2'-O-methyladenosine-3'-phosphate
  modified_base 9: mod_base = OTHER; note = 2'-O-methyladenosine-3'-phosphate
  modified_base 10: mod_base = OTHER; note = 2'-O-methyluridine-3'-phosphate
  modified_base 11: mod_base = OTHER; note = 2'-O-methyladenosine-3'-phosphate
  modified_base 12: mod_base = OTHER; note = 2'-O-methylcytidine-3'-phosphate
  modified_base 13: mod_base = OTHER; note = 2'-O-methyladenosine-3'-phosphate
  modified_base 14: mod_base = OTHER; note = 2'-deoxy-2'-fluoroguanosine-3'-phosphate
  modified_base 15: mod_base = OTHER; note = 2'-O-methyluridine-3'-phosphate
  modified_base 16: mod_base = OTHER; note = 2'-deoxy-2'-fluorocytidine-3'-phosphate
  modified_base 17: mod_base = OTHER; note = 2'-O-methyladenosine-3'-phosphate
  modified_base 18: mod_base = OTHER; note = 2'-O-methylcytidine-3'-phosphate
  modified_base 19: mod_base = OTHER; note = 2'-O-methyladenosine-3'-phosphate
  modified_base 20: mod_base = OTHER; note = 2'-O-methyluridine-3'-phosphate
  modified_base 21: mod_base = OTHER; note = 2'-O-methylcytidine-3'-phosphorothioate
  modified_base 22: mod_base = OTHER; note = 2'-O-methyluridine-3'-phosphorothioate
  modified_base 23: mod_base = OTHER; note = 2'-O-methylguanosine
ttcaggaaatacagtcacatctg

SEQ ID NO: 13244 - RNA, 23 nt, synthetic construct
  source 1..23: mol_type = other RNA
  modified_base 1: mod_base = OTHER; note = 2'-O-methyluridine-3'-phosphorothioate 5'-(E)-Vinylphosphonate
  modified_base 2: mod_base = OTHER; note = 2'-deoxy-2'-fluoroadenosine-3'-phosphorothioate
  modified_base 3: mod_base = OTHER; note = 2'-O-methyluridine-3'-phosphate
  modified_base 4: mod_base = OTHER; note = 2'-O-methylcytidine-3'-phosphate
  modified_base 5: mod_base = OTHER; note = 2'-O-methyladenosine-3'-phosphate
  modified_base 6: mod_base = OTHER; note = 2'-deoxy-2'-fluoroguanosine-3'-phosphate
  modified_base 7: mod_base = OTHER; note = 2'-O-methylguanosine-3'-phosphate
  modified_base 8: mod_base = OTHER; note = 2'-O-methyladenosine-3'-phosphate
  modified_base 9: mod_base = OTHER; note = 2'-O-methyladenosine-3'-phosphate
  modified_base 10: mod_base = OTHER; note = 2'-O-methyladenosine-3'-phosphate
  modified_base 11: mod_base = OTHER; note = 2'-O-methyluridine-3'-phosphate
  modified_base 12: mod_base = OTHER; note = 2'-O-methyladenosine-3'-phosphate
  modified_base 13: mod_base = OTHER; note = 2'-O-methylcytidine-3'-phosphate
  modified_base 14: mod_base = OTHER; note = 2'-deoxy-2'-fluoroadenosine-3'-phosphate
  modified_base 15: mod_base = OTHER; note = 2'-O-methylguanosine-3'-phosphate
  modified_base 16: mod_base = OTHER; note = 2'-deoxy-2'-fluorouridine-3'-phosphate
  modified_base 17: mod_base = OTHER; note = 2'-O-methylcytidine-3'-phosphate
  modified_base 18: mod_base = OTHER; note = 2'-O-methyladenosine-3'-phosphate
  modified_base 19: mod_base = OTHER; note = 2'-O-methylcytidine-3'-phosphate
  modified_base 20: mod_base = OTHER; note = 2'-O-methyladenosine-3'-phosphate
  modified_base 21: mod_base = OTHER; note = 2'-O-methyluridine-3'-phosphorothioate
  modified_base 22: mod_base = OTHER; note = 2'-O-methylcytidine-3'-phosphorothioate
  modified_base 23: mod_base = OTHER; note = 2'-O-methyluridine
tatcaggaaatacagtcacatct

SEQ ID NO: 13245 - RNA, 23 nt, synthetic construct
  source 1..23: mol_type = other RNA
  modified_base 1: mod_base = OTHER; note = 2'-O-methyluridine-3'-phosphorothioate 5'-(E)-Vinylphosphonate
  modified_base 2: mod_base = OTHER; note = 2'-deoxy-2'-fluoroguanosine-3'-phosphorothioate
  modified_base 3: mod_base = OTHER; note = 2'-O-methyladenosine-3'-phosphate
  modified_base 4: mod_base = OTHER; note = 2'-O-methyluridine-3'-phosphate
  modified_base 5: mod_base = OTHER; note = 2'-O-methylcytidine-3'-phosphate
  modified_base 6: mod_base = OTHER; note = 2'-deoxy-2'-fluoroadenosine-3'-phosphate
  modified_base 7: mod_base = OTHER; note = 2'-O-methylguanosine-3'-phosphate
  modified_base 8: mod_base = OTHER; note = 2'-O-methylguanosine-3'-phosphate
  modified_base 9: mod_base = OTHER; note = 2'-O-methyladenosine-3'-phosphate
  modified_base 10: mod_base = OTHER; note = 2'-O-methyladenosine-3'-phosphate
  modified_base 11: mod_base = OTHER; note = 2'-O-methyladenosine-3'-phosphate
  modified_base 12: mod_base = OTHER; note = 2'-O-methyluridine-3'-phosphate
  modified_base 13: mod_base = OTHER; note = 2'-O-methyladenosine-3'-phosphate
  modified_base 14: mod_base = OTHER; note = 2'-deoxy-2'-fluorocytidine-3'-phosphate
  modified_base 15: mod_base = OTHER; note = 2'-O-methyladenosine-3'-phosphate
  modified_base 16: mod_base = OTHER; note = 2'-deoxy-2'-fluoroguanosine-3'-phosphate
  modified_base 17: mod_base = OTHER; note = 2'-O-methyluridine-3'-phosphate
  modified_base 18: mod_base = OTHER; note = 2'-O-methylcytidine-3'-phosphate
  modified_base 19: mod_base = OTHER; note = 2'-O-methyladenosine-3'-phosphate
  modified_base 20: mod_base = OTHER; note = 2'-O-methylcytidine-3'-phosphate
  modified_base 21: mod_base = OTHER; note = 2'-O-methyladenosine-3'-phosphorothioate
  modified_base 22: mod_base = OTHER; note = 2'-O-methyluridine-3'-phosphorothioate
  modified_base 23: mod_base = OTHER; note = 2'-O-methylcytidine
tgatcaggaaatacagtcacatc

SEQ ID NO: 13246 - RNA, 23 nt, synthetic construct
  source 1..23: mol_type = other RNA
  modified_base 1: mod_base = OTHER; note = 2'-O-methyluridine-3'-phosphorothioate 5'-(E)-Vinylphosphonate
  modified_base 2: mod_base = OTHER; note = 2'-deoxy-2'-fluorouridine-3'-phosphorothioate
  modified_base 3: mod_base = OTHER; note = 2'-O-methylguanosine-3'-phosphate
  modified_base 4: mod_base = OTHER; note = 2'-O-methyladenosine-3'-phosphate
  modified_base 5: mod_base = OTHER; note = 2'-O-methyluridine-3'-phosphate
  modified_base 6: mod_base = OTHER; note = 2'-deoxy-2'-fluorocytidine-3'-phosphate
  modified_base 7: mod_base = OTHER; note = 2'-O-methyladenosine-3'-phosphate
  modified_base 8: mod_base = OTHER; note = 2'-O-methylguanosine-3'-phosphate
  modified_base 9: mod_base = OTHER; note = 2'-O-methylguanosine-3'-phosphate
  modified_base 10: mod_base = OTHER; note = 2'-O-methyladenosine-3'-phosphate
  modified_base 11: mod_base = OTHER; note = 2'-O-methyladenosine-3'-phosphate
  modified_base 12: mod_base = OTHER; note = 2'-O-methyladenosine-3'-phosphate
  modified_base 13: mod_base = OTHER; note = 2'-O-methyluridine-3'-phosphate
  modified_base 14: mod_base = OTHER; note = 2'-deoxy-2'-fluoroadenosine-3'-phosphate
  modified_base 15: mod_base = OTHER; note = 2'-O-methylcytidine-3'-phosphate
  modified_base 16: mod_base = OTHER; note = 2'-deoxy-2'-fluoroadenosine-3'-phosphate
  modified_base 17: mod_base = OTHER; note = 2'-O-methylguanosine-3'-phosphate
  modified_base 18: mod_base = OTHER; note = 2'-O-methyluridine-3'-phosphate
  modified_base 19: mod_base = OTHER; note = 2'-O-methylcytidine-3'-phosphate
  modified_base 20: mod_base = OTHER; note = 2'-O-methyladenosine-3'-phosphate
  modified_base 21: mod_base = OTHER; note = 2'-O-methylcytidine-3'-phosphorothioate
  modified_base 22: mod_base = OTHER; note = 2'-O-methyladenosine-3'-phosphorothioate
  modified_base 23: mod_base = OTHER; note = 2'-O-methyluridine
ttgatcaggaaatacagtcacat

SEQ ID NO: 13247 - RNA, 23 nt, synthetic construct
  source 1..23: mol_type = other RNA
  modified_base 1: mod_base = OTHER; note = 2'-O-methyluridine-3'-phosphorothioate 5'-(E)-Vinylphosphonate
  modified_base 2: mod_base = OTHER; note = 2'-deoxy-2'-fluoroadenosine-3'-phosphorothioate
  modified_base 3: mod_base = OTHER; note = 2'-O-methyladenosine-3'-phosphate
  modified_base 4: mod_base = OTHER; note = 2'-O-methyluridine-3'-phosphate
  modified_base 5: mod_base = OTHER; note = 2'-O-methylguanosine-3'-phosphate
  modified_base 6: mod_base = OTHER; note = 2'-deoxy-2'-fluoroadenosine-3'-phosphate
  modified_base 7: mod_base = OTHER; note = 2'-O-methyluridine-3'-phosphate
  modified_base 8: mod_base = OTHER; note = 2'-O-methylcytidine-3'-phosphate
  modified_base 9: mod_base = OTHER; note = 2'-O-methyladenosine-3'-phosphate
  modified_base 10: mod_base = OTHER; note = 2'-O-methylguanosine-3'-phosphate
  modified_base 11: mod_base = OTHER; note = 2'-O-methylguanosine-3'-phosphate
  modified_base 12: mod_base = OTHER; note = 2'-O-methyladenosine-3'-phosphate
  modified_base 13: mod_base = OTHER; note = 2'-O-methyladenosine-3'-phosphate
  modified_base 14: mod_base = OTHER; note = 2'-deoxy-2'-fluoroadenosine-3'-phosphate
  modified_base 15: mod_base = OTHER; note = 2'-O-methyluridine-3'-phosphate
  modified_base 16: mod_base = OTHER; note = 2'-deoxy-2'-fluoroadenosine-3'-phosphate
  modified_base 17: mod_base = OTHER; note = 2'-O-methylcytidine-3'-phosphate
  modified_base 18: mod_base = OTHER; note = 2'-O-methyladenosine-3'-phosphate
  modified_base 19: mod_base = OTHER; note = 2'-O-methylguanosine-3'-phosphate
  modified_base 20: mod_base = OTHER; note = 2'-O-methyluridine-3'-phosphate
  modified_base 21: mod_base = OTHER; note = 2'-O-methylcytidine-3'-phosphorothioate
  modified_base 22: mod_base = OTHER; note = 2'-O-methyladenosine-3'-phosphorothioate
  modified_base 23: mod_base = OTHER; note = 2'-O-methylcytidine
taatgatcaggaaatacagtcac

SEQ ID NO: 13248 - RNA, 23 nt, synthetic construct
  source 1..23: mol_type = other RNA
  modified_base 1: mod_base = OTHER; note = 2'-O-methyluridine-3'-phosphorothioate 5'-(E)-Vinylphosphonate
  modified_base 2: mod_base = OTHER; note = 2'-deoxy-2'-fluorocytidine-3'-phosphorothioate
  modified_base 3: mod_base = OTHER; note = 2'-O-methyladenosine-3'-phosphate
  modified_base 4: mod_base = OTHER; note = 2'-O-methyladenosine-3'-phosphate
  modified_base 5: mod_base = OTHER; note = 2'-O-methyluridine-3'-phosphate
  modified_base 6: mod_base = OTHER; note = 2'-deoxy-2'-fluoroguanosine-3'-phosphate
  modified_base 7: mod_base = OTHER; note = 2'-O-methyladenosine-3'-phosphate
  modified_base 8: mod_base = OTHER; note = 2'-O-methyluridine-3'-phosphate
  modified_base 9: mod_base = OTHER; note = 2'-O-methylcytidine-3'-phosphate
  modified_base 10: mod_base = OTHER; note = 2'-O-methyladenosine-3'-phosphate
  modified_base 11: mod_base = OTHER; note = 2'-O-methylguanosine-3'-phosphate
  modified_base 12: mod_base = OTHER; note = 2'-O-methylguanosine-3'-phosphate
  modified_base 13: mod_base = OTHER; note = 2'-O-methyladenosine-3'-phosphate
  modified_base 14: mod_base = OTHER; note = 2'-deoxy-2'-fluoroadenosine-3'-phosphate
  modified_base 15: mod_base = OTHER; note = 2'-O-methyladenosine-3'-phosphate
  modified_base 16: mod_base = OTHER; note = 2'-deoxy-2'-fluorouridine-3'-phosphate
  modified_base 17: mod_base = OTHER; note = 2'-O-methyladenosine-3'-phosphate
  modified_base 18: mod_base = OTHER; note = 2'-O-methylcytidine-3'-phosphate
  modified_base 19: mod_base = OTHER; note = 2'-O-methyladenosine-3'-phosphate
  modified_base 20: mod_base = OTHER; note = 2'-O-methylguanosine-3'-phosphate
  modified_base 21: mod_base = OTHER; note = 2'-O-methyluridine-3'-phosphorothioate
  modified_base 22: mod_base = OTHER; note = 2'-O-methylcytidine-3'-phosphorothioate
  modified_base 23: mod_base = OTHER; note = 2'-O-methyladenosine
tcaatgatcaggaaatacagtca

SEQ ID NO: 13249 - RNA, 23 nt, synthetic construct
  source 1..23: mol_type = other RNA
  modified_base 1: mod_base = OTHER; note = 2'-O-methyluridine-3'-phosphorothioate 5'-(E)-Vinylphosphonate
  modified_base 2: mod_base = OTHER; note = 2'-deoxy-2'-fluorocytidine-3'-phosphorothioate
  modified_base 3: mod_base = OTHER; note = 2'-O-methylcytidine-3'-phosphate
  modified_base 4: mod_base = OTHER; note = 2'-O-methyladenosine-3'-phosphate
  modified_base 5: mod_base = OTHER; note = 2'-O-methyladenosine-3'-phosphate
  modified_base 6: mod_base = OTHER; note = 2'-deoxy-2'-fluorouridine-3'-phosphate
  modified_base 7: mod_base = OTHER; note = 2'-O-methylguanosine-3'-phosphate
  modified_base 8: mod_base = OTHER; note = 2'-O-methyladenosine-3'-phosphate
  modified_base 9: mod_base = OTHER; note = 2'-O-methyluridine-3'-phosphate
  modified_base 10: mod_base = OTHER; note = 2'-O-methylcytidine-3'-phosphate
  modified_base 11: mod_base = OTHER; note = 2'-O-methyladenosine-3'-phosphate
  modified_base 12: mod_base = OTHER; note = 2'-O-methylguanosine-3'-phosphate
  modified_base 13: mod_base = OTHER; note = 2'-O-methylguanosine-3'-phosphate
  modified_base 14: mod_base = OTHER; note = 2'-deoxy-2'-fluoroadenosine-3'-phosphate
  modified_base 15: mod_base = OTHER; note = 2'-O-methyladenosine-3'-phosphate
  modified_base 16: mod_base = OTHER; note = 2'-deoxy-2'-fluoroadenosine-3'-phosphate
  modified_base 17: mod_base = OTHER; note = 2'-O-methyluridine-3'-phosphate
  modified_base 18: mod_base = OTHER; note = 2'-O-methyladenosine-3'-phosphate
  modified_base 19: mod_base = OTHER; note = 2'-O-methylcytidine-3'-phosphate
  modified_base 20: mod_base = OTHER; note = 2'-O-methyladenosine-3'-phosphate
  modified_base 21: mod_base = OTHER; note = 2'-O-methylguanosine-3'-phosphorothioate
  modified_base 22: mod_base = OTHER; note = 2'-O-methyluridine-3'-phosphorothioate
  modified_base 23: mod_base = OTHER; note = 2'-O-methylcytidine
tccaatgatcaggaaatacagtc

SEQ ID NO: 13250 - RNA, 23 nt, synthetic construct
  source 1..23: mol_type = other RNA
  modified_base 1: mod_base = OTHER; note = 2'-O-methyluridine-3'-phosphorothioate 5'-(E)-Vinylphosphonate
  modified_base 2: mod_base = OTHER; note = 2'-deoxy-2'-fluoroadenosine-3'-phosphorothioate
  modified_base 3: mod_base = OTHER; note = 2'-O-methylcytidine-3'-phosphate
  modified_base 4: mod_base = OTHER; note = 2'-O-methylcytidine-3'-phosphate
  modified_base 5: mod_base = OTHER; note = 2'-O-methyladenosine-3'-phosphate
  modified_base 6: mod_base = OTHER; note = 2'-deoxy-2'-fluoroadenosine-3'-phosphate
  modified_base 7: mod_base = OTHER; note = 2'-O-methyluridine-3'-phosphate
  modified_base 8: mod_base = OTHER; note = 2'-O-methylguanosine-3'-phosphate
  modified_base 9: mod_base = OTHER; note = 2'-O-methyladenosine-3'-phosphate
  modified_base 10: mod_base = OTHER; note = 2'-O-methyluridine-3'-phosphate
  modified_base 11: mod_base = OTHER; note = 2'-O-methylcytidine-3'-phosphate
  modified_base 12: mod_base = OTHER; note = 2'-O-methyladenosine-3'-phosphate
  modified_base 13: mod_base = OTHER; note = 2'-O-methylguanosine-3'-phosphate
  modified_base 14: mod_base = OTHER; note = 2'-deoxy-2'-fluoroguanosine-3'-phosphate
  modified_base 15: mod_base = OTHER; note = 2'-O-methyladenosine-3'-phosphate
  modified_base 16: mod_base = OTHER; note = 2'-deoxy-2'-fluoroadenosine-3'-phosphate
  modified_base 17: mod_base = OTHER; note = 2'-O-methyladenosine-3'-phosphate
  modified_base 18: mod_base = OTHER; note = 2'-O-methyluridine-3'-phosphate
  modified_base 19: mod_base = OTHER; note = 2'-O-methyladenosine-3'-phosphate
  modified_base 20: mod_base = OTHER; note = 2'-O-methylcytidine-3'-phosphate
  modified_base 21: mod_base = OTHER; note = 2'-O-methyladenosine-3'-phosphorothioate
  modified_base 22: mod_base = OTHER; note = 2'-O-methylguanosine-3'-phosphorothioate
  modified_base 23: mod_base = OTHER; note = 2'-O-methyluridine
taccaatgatcaggaaatacagt

SEQ ID NO: 13251 - RNA, 23 nt, synthetic construct
  source 1..23: mol_type = other RNA
  modified_base 1: mod_base = OTHER; note = 2'-O-methyluridine-3'-phosphorothioate 5'-(E)-Vinylphosphonate
  modified_base 2: mod_base = OTHER; note = 2'-deoxy-2'-fluoroguanosine-3'-phosphorothioate
  modified_base 3: mod_base = OTHER; note = 2'-O-methyladenosine-3'-phosphate
  modified_base 4: mod_base = OTHER; note = 2'-O-methylcytidine-3'-phosphate
  modified_base 5: mod_base = OTHER; note = 2'-O-methylcytidine-3'-phosphate
  modified_base 6: mod_base = OTHER; note = 2'-deoxy-2'-fluoroadenosine-3'-phosphate
  modified_base 7: mod_base = OTHER; note = 2'-O-methyladenosine-3'-phosphate
  modified_base 8: mod_base = OTHER; note = 2'-O-methyluridine-3'-phosphate
  modified_base 9: mod_base = OTHER; note = 2'-O-methylguanosine-3'-phosphate
  modified_base 10: mod_base = OTHER; note = 2'-O-methyladenosine-3'-phosphate
  modified_base 11: mod_base = OTHER; note = 2'-O-methyluridine-3'-phosphate
  modified_base 12: mod_base = OTHER; note = 2'-O-methylcytidine-3'-phosphate
  modified_base 13: mod_base = OTHER; note = 2'-O-methyladenosine-3'-phosphate
  modified_base 14: mod_base = OTHER; note = 2'-deoxy-2'-fluoroguanosine-3'-phosphate
  modified_base 15: mod_base = OTHER; note = 2'-O-methylguanosine-3'-phosphate
  modified_base 16: mod_base = OTHER; note = 2'-deoxy-2'-fluoroadenosine-3'-phosphate
  modified_base 17: mod_base = OTHER; note = 2'-O-methyladenosine-3'-phosphate
  modified_base 18: mod_base = OTHER; note = 2'-O-methyladenosine-3'-phosphate
  modified_base 19: mod_base = OTHER; note = 2'-O-methyluridine-3'-phosphate
  modified_base 20: mod_base = OTHER; note = 2'-O-methyladenosine-3'-phosphate
  modified_base 21: mod_base = OTHER; note = 2'-O-methylcytidine-3'-phosphorothioate
  modified_base 22: mod_base = OTHER; note = 2'-O-methyladenosine-3'-phosphorothioate
  modified_base 23: mod_base = OTHER; note = 2'-O-methylguanosine
tgaccaatgatcaggaaatacag

SEQ ID NO: 13252 - RNA, 23 nt, synthetic construct
  source 1..23: mol_type = other RNA
  modified_base 1: mod_base = OTHER; note = 2'-O-methyluridine-3'-phosphorothioate 5'-(E)-Vinylphosphonate
  modified_base 2: mod_base = OTHER; note = 2'-deoxy-2'-fluorouridine-3'-phosphorothioate
  modified_base 3: mod_base = OTHER; note = 2'-O-methylguanosine-3'-phosphate
  modified_base 4: mod_base = OTHER; note = 2'-O-methylguanosine-3'-phosphate
  modified_base 5: mod_base = OTHER; note = 2'-O-methylguanosine-3'-phosphate
  modified_base 6: mod_base = OTHER; note = 2'-deoxy-2'-fluorouridine-3'-phosphate
  modified_base 7: mod_base = OTHER; note = 2'-O-methyladenosine-3'-phosphate
  modified_base 8: mod_base = OTHER; note = 2'-O-methyluridine-3'-phosphate
  modified_base 9: mod_base = OTHER; note = 2'-O-methyladenosine-3'-phosphate
  modified_base 10: mod_base = OTHER; note = 2'-O-methyladenosine-3'-phosphate
  modified_base 11: mod_base = OTHER; note = 2'-O-methylguanosine-3'-phosphate
  modified_base 12: mod_base = OTHER; note = 2'-O-methylguanosine-3'-phosphate
  modified_base 13: mod_base = OTHER; note = 2'-O-methylguanosine-3'-phosphate
  modified_base 14: mod_base = OTHER; note = 2'-deoxy-2'-fluorouridine-3'-phosphate
  modified_base 15: mod_base = OTHER; note = 2'-O-methyladenosine-3'-phosphate
  modified_base 16: mod_base = OTHER; note = 2'-deoxy-2'-fluoroadenosine-3'-phosphate
  modified_base 17: mod_base = OTHER; note = 2'-O-methyluridine-3'-phosphate
  modified_base 18: mod_base = OTHER; note = 2'-O-methylcytidine-3'-phosphate
  modified_base 19: mod_base = OTHER; note = 2'-O-methyluridine-3'-phosphate
  modified_base 20: mod_base = OTHER; note = 2'-O-methylcytidine-3'-phosphate
  modified_base 21: mod_base = OTHER; note = 2'-O-methylcytidine-3'-phosphorothioate
  modified_base 22: mod_base = OTHER; note = 2'-O-methyluridine-3'-phosphorothioate
  modified_base 23: mod_base = OTHER; note = 2'-O-methyladenosine
ttgggtataagggtaatctccta

SEQ ID NO: 13253 - RNA, 23 nt, synthetic construct
  source 1..23: mol_type = other RNA
  modified_base 1: mod_base = OTHER; note = 2'-O-methyluridine-3'-phosphorothioate 5'-(E)-Vinylphosphonate
  modified_base 2: mod_base = OTHER; note = 2'-deoxy-2'-fluoroadenosine-3'-phosphorothioate
  modified_base 3: mod_base = OTHER; note = 2'-O-methyladenosine-3'-phosphate
  modified_base 4: mod_base = OTHER; note = 2'-O-methyluridine-3'-phosphate
  modified_base 5: mod_base = OTHER; note = 2'-O-methyluridine-3'-phosphate
  modified_base 6: mod_base = OTHER; note = 2'-deoxy-2'-fluoroguanosine-3'-phosphate
  modified_base 7: mod_base = OTHER; note = 2'-O-methylcytidine-3'-phosphate
  modified_base 8: mod_base = OTHER; note = 2'-O-methyladenosine-3'-phosphate
  modified_base 9: mod_base = OTHER; note = 2'-O-methylguanosine-3'-phosphate
  modified_base 10: mod_base = OTHER; note = 2'-O-methyluridine-3'-phosphate
  modified_base 11: mod_base = OTHER; note = 2'-O-methyluridine-3'-phosphate
  modified_base 12: mod_base = OTHER; note = 2'-O-methylguanosine-3'-phosphate
  modified_base 13: mod_base = OTHER; note = 2'-O-methylguanosine-3'-phosphate
  modified_base 14: mod_base = OTHER; note = 2'-deoxy-2'-fluoroadenosine-3'-phosphate
  modified_base 15: mod_base = OTHER; note = 2'-O-methyluridine-3'-phosphate
  modified_base 16: mod_base = OTHER; note = 2'-deoxy-2'-fluorouridine-3'-phosphate
  modified_base 17: mod_base = OTHER; note = 2'-O-methyluridine-3'-phosphate
  modified_base 18: mod_base = OTHER; note = 2'-O-methyluridine-3'-phosphate
  modified_base 19: mod_base = OTHER; note = 2'-O-methyladenosine-3'-phosphate
  modified_base 20: mod_base = OTHER; note = 2'-O-methylguanosine-3'-phosphate
  modified_base 21: mod_base = OTHER; note = 2'-O-methylcytidine-3'-phosphorothioate
  modified_base 22: mod_base = OTHER; note = 2'-O-methylcytidine-3'-phosphorothioate
  modified_base 23: mod_base = OTHER; note = 2'-O-methylcytidine
taattgcagttggattttagccc

SEQ ID NO: 13254 - RNA, 23 nt, synthetic construct
  source 1..23: mol_type = other RNA
  modified_base 1: mod_base = OTHER; note = 2'-O-methyluridine-3'-phosphorothioate 5'-(E)-Vinylphosphonate
  modified_base 2: mod_base = OTHER; note = 2'-deoxy-2'-fluoroadenosine-3'-phosphorothioate
  modified_base 3: mod_base = OTHER; note = 2'-O-methylguanosine-3'-phosphate
  modified_base 4: mod_base = OTHER; note = 2'-O-methyluridine-3'-phosphate
  modified_base 5: mod_base = OTHER; note = 2'-O-methyluridine-3'-phosphate
  modified_base 6: mod_base = OTHER; note = 2'-deoxy-2'-fluoroguanosine-3'-phosphate
  modified_base 7: mod_base = OTHER; note = 2'-O-methylguanosine-3'-phosphate
  modified_base 8: mod_base = OTHER; note = 2'-O-methyladenosine-3'-phosphate
  modified_base 9: mod_base = OTHER; note = 2'-O-methyluridine-3'-phosphate
  modified_base 10: mod_base = OTHER; note = 2'-O-methyluridine-3'-phosphate
  modified_base 11: mod_base = OTHER; note = 2'-O-methyluridine-3'-phosphate
  modified_base 12: mod_base = OTHER; note = 2'-O-methyluridine-3'-phosphate
  modified_base 13: mod_base = OTHER; note = 2'-O-methyladenosine-3'-phosphate
  modified_base 14: mod_base = OTHER; note = 2'-deoxy-2'-fluoroguanosine-3'-phosphate
  modified_base 15: mod_base = OTHER; note = 2'-O-methylcytidine-3'-phosphate
  modified_base 16: mod_base = OTHER; note = 2'-deoxy-2'-fluorocytidine-3'-phosphate
  modified_base 17: mod_base = OTHER; note = 2'-O-methylcytidine-3'-phosphate
  modified_base 18: mod_base = OTHER; note = 2'-O-methylguanosine-3'-phosphate
  modified_base 19: mod_base = OTHER; note = 2'-O-methylcytidine-3'-phosphate
  modified_base 20: mod_base = OTHER; note = 2'-O-methyladenosine-3'-phosphate
  modified_base 21: mod_base = OTHER; note = 2'-O-methylcytidine-3'-phosphorothioate
  modified_base 22: mod_base = OTHER; note = 2'-O-methylcytidine-3'-phosphorothioate
  modified_base 23: mod_base = OTHER; note = 2'-O-methyluridine
tagttggattttagcccgcacct

SEQ ID NO: 13255 - RNA, 23 nt, synthetic construct
  source 1..23: mol_type = other RNA
  modified_base 1: mod_base = OTHER; note = 2'-O-methyluridine-3'-phosphorothioate 5'-(E)-Vinylphosphonate
  modified_base 2: mod_base = OTHER; note = 2'-deoxy-2'-fluorocytidine-3'-phosphorothioate
  modified_base 3: mod_base = OTHER; note = 2'-O-methyladenosine-3'-phosphate
  modified_base 4: mod_base = OTHER; note = 2'-O-methylguanosine-3'-phosphate
  modified_base 5: mod_base = OTHER; note = 2'-O-methyluridine-3'-phosphate
  modified_base 6: mod_base = OTHER; note = 2'-deoxy-2'-fluorouridine-3'-phosphate
  modified_base 7: mod_base = OTHER; note = 2'-O-methylguanosine-3'-phosphate
  modified_base 8: mod_base = OTHER; note = 2'-O-methylguanosine-3'-phosphate
  modified_base 9: mod_base = OTHER; note = 2'-O-methyladenosine-3'-phosphate
  modified_base 10: mod_base = OTHER; note = 2'-O-methyluridine-3'-phosphate
  modified_base 11: mod_base = OTHER; note = 2'-O-methyluridine-3'-phosphate
  modified_base 12: mod_base = OTHER; note = 2'-O-methyluridine-3'-phosphate
  modified_base 13: mod_base = OTHER; note = 2'-O-methyluridine-3'-phosphate
  modified_base 14: mod_base = OTHER; note = 2'-deoxy-2'-fluoroadenosine-3'-phosphate
  modified_base 15: mod_base = OTHER; note = 2'-O-methylguanosine-3'-phosphate
  modified_base 16: mod_base = OTHER; note = 2'-deoxy-2'-fluorocytidine-3'-phosphate
  modified_base 17: mod_base = OTHER; note = 2'-O-methylcytidine-3'-phosphate
  modified_base 18: mod_base = OTHER; note = 2'-O-methylcytidine-3'-phosphate
  modified_base 19: mod_base = OTHER; note = 2'-O-methylguanosine-3'-phosphate
  modified_base 20: mod_base = OTHER; note = 2'-O-methylcytidine-3'-phosphate
  modified_base 21: mod_base = OTHER; note = 2'-O-methyladenosine-3'-phosphorothioate
  modified_base 22: mod_base = OTHER; note = 2'-O-methylcytidine-3'-phosphorothioate
  modified_base 23: mod_base = OTHER; note = 2'-O-methylcytidine
tcagttggattttagcccgcacc

SEQ ID NO: 13256 - RNA, 23 nt, synthetic construct
  source 1..23: mol_type = other RNA
  modified_base 1: mod_base = OTHER; note = 2'-O-methyluridine-3'-phosphorothioate 5'-(E)-Vinylphosphonate
  modified_base 2: mod_base = OTHER; note = 2'-deoxy-2'-fluoroguanosine-3'-phosphorothioate
  modified_base 3: mod_base = OTHER; note = 2'-O-methylcytidine-3'-phosphate
  modified_base 4: mod_base = OTHER; note = 2'-O-methyladenosine-3'-phosphate
  modified_base 5: mod_base = OTHER; note = 2'-O-methylguanosine-3'-phosphate
  modified_base 6: mod_base = OTHER; note = 2'-deoxy-2'-fluorouridine-3'-phosphate
  modified_base 7: mod_base = OTHER; note = 2'-O-methyluridine-3'-phosphate
  modified_base 8: mod_base = OTHER; note = 2'-O-methylguanosine-3'-phosphate
  modified_base 9: mod_base = OTHER; note = 2'-O-methylguanosine-3'-phosphate
  modified_base 10: mod_base = OTHER; note = 2'-O-methyladenosine-3'-phosphate
  modified_base 11: mod_base = OTHER; note = 2'-O-methyluridine-3'-phosphate
  modified_base 12: mod_base = OTHER; note = 2'-O-methyluridine-3'-phosphate
  modified_base 13: mod_base = OTHER; note = 2'-O-methyluridine-3'-phosphate
  modified_base 14: mod_base = OTHER; note = 2'-deoxy-2'-fluorouridine-3'-phosphate
  modified_base 15: mod_base = OTHER; note = 2'-O-methyladenosine-3'-phosphate
  modified_base 16: mod_base = OTHER; note = 2'-deoxy-2'-fluoroguanosine-3'-phosphate
  modified_base 17: mod_base = OTHER; note = 2'-O-methylcytidine-3'-phosphate
  modified_base 18: mod_base = OTHER; note = 2'-O-methylcytidine-3'-phosphate
  modified_base 19: mod_base = OTHER; note = 2'-O-methylcytidine-3'-phosphate
  modified_base 20: mod_base = OTHER; note = 2'-O-methylguanosine-3'-phosphate
  modified_base 21: mod_base = OTHER; note = 2'-O-methylcytidine-3'-phosphorothioate
  modified_base 22: mod_base = OTHER; note = 2'-O-methyladenosine-3'-phosphorothioate
  modified_base 23: mod_base = OTHER; note = 2'-O-methylcytidine
tgcagttggattttagcccgcac

SEQ ID NO: 13257 - RNA, 23 nt, synthetic construct
  source 1..23: mol_type = other RNA
  modified_base 1: mod_base = OTHER; note = 2'-O-methyluridine-3'-phosphorothioate 5'-(E)-Vinylphosphonate
  modified_base 2: mod_base = OTHER; note = 2'-deoxy-2'-fluorouridine-3'-phosphorothioate
  modified_base 3: mod_base = OTHER; note = 2'-O-methylguanosine-3'-phosphate
  modified_base 4: mod_base = OTHER; note = 2'-O-methylcytidine-3'-phosphate
  modified_base 5: mod_base = OTHER; note = 2'-O-methyladenosine-3'-phosphate
  modified_base 6: mod_base = OTHER; note = 2'-deoxy-2'-fluoroguanosine-3'-phosphate
  modified_base 7: mod_base = OTHER; note = 2'-O-methyluridine-3'-phosphate
  modified_base 8: mod_base = OTHER; note = 2'-O-methyluridine-3'-phosphate
  modified_base 9: mod_base = OTHER; note = 2'-O-methylguanosine-3'-phosphate
  modified_base 10: mod_base = OTHER; note = 2'-O-methylguanosine-3'-phosphate
  modified_base 11: mod_base = OTHER; note = 2'-O-methyladenosine-3'-phosphate
  modified_base 12: mod_base = OTHER; note = 2'-O-methyluridine-3'-phosphate
  modified_base 13: mod_base = OTHER; note = 2'-O-methyluridine-3'-phosphate
  modified_base 14: mod_base = OTHER; note = 2'-deoxy-2'-fluorouridine-3'-phosphate
  modified_base 15: mod_base = OTHER; note = 2'-O-methyluridine-3'-phosphate
  modified_base 16: mod_base = OTHER; note = 2'-deoxy-2'-fluoroadenosine-3'-phosphate
  modified_base 17: mod_base = OTHER; note = 2'-O-methylguanosine-3'-phosphate
  modified_base 18: mod_base = OTHER; note = 2'-O-methylcytidine-3'-phosphate
  modified_base 19: mod_base = OTHER; note = 2'-O-methylcytidine-3'-phosphate
  modified_base 20: mod_base = OTHER; note = 2'-O-methylcytidine-3'-phosphate
  modified_base 21: mod_base = OTHER; note = 2'-O-methylguanosine-3'-phosphorothioate
  modified_base 22: mod_base = OTHER; note = 2'-O-methylcytidine-3'-phosphorothioate
  modified_base 23: mod_base = OTHER; note = 2'-O-methyladenosine
ttgcagttggattttagcccgca

SEQ ID NO: 13258 - RNA, 23 nt, synthetic construct
  source 1..23: mol_type = other RNA
  modified_base 1: mod_base = OTHER; note = 2'-O-methyluridine-3'-phosphorothioate 5'-(E)-Vinylphosphonate
  modified_base 2: mod_base = OTHER; note = 2'-deoxy-2'-fluorouridine-3'-phosphorothioate
  modified_base 3: mod_base = OTHER; note = 2'-O-methyluridine-3'-phosphate
  modified_base 4: mod_base = OTHER; note = 2'-O-methylguanosine-3'-phosphate
  modified_base 5: mod_base = OTHER; note = 2'-O-methylcytidine-3'-phosphate
  modified_base 6: mod_base = OTHER; note = 2'-deoxy-2'-fluoroadenosine-3'-phosphate
  modified_base 7: mod_base = OTHER; note = 2'-O-methylguanosine-3'-phosphate
  modified_base 8: mod_base = OTHER; note = 2'-O-methyluridine-3'-phosphate
  modified_base 9: mod_base = OTHER; note = 2'-O-methyluridine-3'-phosphate
  modified_base 10: mod_base = OTHER; note = 2'-O-methylguanosine-3'-phosphate
  modified_base 11: mod_base = OTHER; note = 2'-O-methylguanosine-3'-phosphate
  modified_base 12: mod_base = OTHER; note = 2'-O-methyladenosine-3'-phosphate
  modified_base 13: mod_base = OTHER; note = 2'-O-methyluridine-3'-phosphate
  modified_base 14: mod_base = OTHER; note = 2'-deoxy-2'-fluorouridine-3'-phosphate
  modified_base 15: mod_base = OTHER; note = 2'-O-methyluridine-3'-phosphate
  modified_base 16: mod_base = OTHER; note = 2'-deoxy-2'-fluorouridine-3'-phosphate
  modified_base 17: mod_base = OTHER; note = 2'-O-methyladenosine-3'-phosphate
  modified_base 18: mod_base = OTHER; note = 2'-O-methylguanosine-3'-phosphate
  modified_base 19: mod_base = OTHER; note = 2'-O-methylcytidine-3'-phosphate
  modified_base 20: mod_base = OTHER; note = 2'-O-methylcytidine-3'-phosphate
  modified_base 21: mod_base = OTHER; note = 2'-O-methylcytidine-3'-phosphorothioate
  modified_base 22: mod_base = OTHER; note = 2'-O-methylguanosine-3'-phosphorothioate
  modified_base 23: mod_base = OTHER; note = 2'-O-methylcytidine
tttgcagttggattttagcccgc

SEQ ID NO: 13259 - RNA, 23 nt, synthetic construct
  source 1..23: mol_type = other RNA
  modified_base 1: mod_base = OTHER; note = 2'-O-methyluridine-3'-phosphorothioate 5'-(E)-Vinylphosphonate
  modified_base 2: mod_base = OTHER; note = 2'-deoxy-2'-fluoroadenosine-3'-phosphorothioate
  modified_base 3: mod_base = OTHER; note = 2'-O-methyluridine-3'-phosphate
  modified_base 4: mod_base = OTHER; note = 2'-O-methyluridine-3'-phosphate
  modified_base 5: mod_base = OTHER; note = 2'-O-methylguanosine-3'-phosphate
  modified_base 6: mod_base = OTHER; note = 2'-deoxy-2'-fluorocytidine-3'-phosphate
  modified_base 7: mod_base = OTHER; note = 2'-O-methyladenosine-3'-phosphate
  modified_base 8: mod_base = OTHER; note = 2'-O-methylguanosine-3'-phosphate
  modified_base 9: mod_base = OTHER; note = 2'-O-methyluridine-3'-phosphate
  modified_base 10: mod_base = OTHER; note = 2'-O-methyluridine-3'-phosphate
  modified_base 11: mod_base = OTHER; note = 2'-O-methylguanosine-3'-phosphate
  modified_base 12: mod_base = OTHER; note = 2'-O-methylguanosine-3'-phosphate
  modified_base 13: mod_base = OTHER; note = 2'-O-methyladenosine-3'-phosphate
  modified_base 14: mod_base = OTHER; note = 2'-deoxy-2'-fluorouridine-3'-phosphate
  modified_base 15: mod_base = OTHER; note = 2'-O-methyluridine-3'-phosphate
  modified_base 16: mod_base = OTHER; note = 2'-deoxy-2'-fluorouridine-3'-phosphate
  modified_base 17: mod_base = OTHER; note = 2'-O-methyluridine-3'-phosphate
  modified_base 18: mod_base = OTHER; note = 2'-O-methyladenosine-3'-phosphate
  modified_base 19: mod_base = OTHER; note = 2'-O-methylguanosine-3'-phosphate
  modified_base 20: mod_base = OTHER; note = 2'-O-methylcytidine-3'-phosphate
  modified_base 21: mod_base = OTHER; note = 2'-O-methylcytidine-3'-phosphorothioate
  modified_base 22: mod_base = OTHER; note = 2'-O-methylcytidine-3'-phosphorothioate
  modified_base 23: mod_base = OTHER; note = 2'-O-methylguanosine
tattgcagttggattttagcccg

SEQ ID NO: 13260 - RNA, 23 nt, synthetic construct
  source 1..23: mol_type = other RNA
  modified_base 1: mod_base = OTHER; note = 2'-O-methyluridine-3'-phosphorothioate 5'-(E)-Vinylphosphonate
  modified_base 2: mod_base = OTHER; note = 2'-deoxy-2'-fluorocytidine-3'-phosphorothioate
  modified_base 3: mod_base = OTHER; note = 2'-O-methyladenosine-3'-phosphate
  modified_base 4: mod_base = OTHER; note = 2'-O-methyladenosine-3'-phosphate
  modified_base 5: mod_base = OTHER; note = 2'-O-methyluridine-3'-phosphate
  modified_base 6: mod_base = OTHER; note = 2'-deoxy-2'-fluorouridine-3'-phosphate
  modified_base 7: mod_base = OTHER; note = 2'-O-methylguanosine-3'-phosphate
  modified_base 8: mod_base = OTHER; note = 2'-O-methylcytidine-3'-phosphate
  modified_base 9: mod_base = OTHER; note = 2'-O-methyladenosine-3'-phosphate
  modified_base 10: mod_base = OTHER; note = 2'-O-methylguanosine-3'-phosphate
  modified_base 11: mod_base = OTHER; note = 2'-O-methyluridine-3'-phosphate
  modified_base 12: mod_base = OTHER; note = 2'-O-methyluridine-3'-phosphate
  modified_base 13: mod_base = OTHER; note = 2'-O-methylguanosine-3'-phosphate
  modified_base 14: mod_base = OTHER; note = 2'-deoxy-2'-fluoroguanosine-3'-phosphate
  modified_base 15: mod_base = OTHER; note = 2'-O-methyladenosine-3'-phosphate
  modified_base 16: mod_base = OTHER; note = 2'-deoxy-2'-fluorouridine-3'-phosphate
  modified_base 17: mod_base = OTHER; note = 2'-O-methyluridine-3'-phosphate
  modified_base 18: mod_base = OTHER; note = 2'-O-methyluridine-3'-phosphate
  modified_base 19: mod_base = OTHER; note = 2'-O-methyluridine-3'-phosphate
  modified_base 20: mod_base = OTHER; note = 2'-O-methyladenosine-3'-phosphate
  modified_base 21: mod_base = OTHER; note = 2'-O-methylguanosine-3'-phosphorothioate
  modified_base 22: mod_base = OTHER; note = 2'-O-methylcytidine-3'-phosphorothioate
  modified_base 23: mod_base = OTHER; note = 2'-O-methylcytidine
tcaattgcagttggattttagcc

SEQ ID NO: 13261 - RNA, 23 nt, synthetic construct
  source 1..23: mol_type = other RNA
  modified_base 1: mod_base = OTHER; note = 2'-O-methyluridine-3'-phosphorothioate 5'-(E)-Vinylphosphonate
  modified_base 2: mod_base = OTHER; note = 2'-deoxy-2'-fluorocytidine-3'-phosphorothioate
  modified_base 3: mod_base = OTHER; note = 2'-O-methylcytidine-3'-phosphate
  modified_base 4: mod_base = OTHER; note = 2'-O-methyladenosine-3'-phosphate
  modified_base 5: mod_base = OTHER; note = 2'-O-methyladenosine-3'-phosphate
  modified_base 6: mod_base = OTHER; note = 2'-deoxy-2'-fluorouridine-3'-phosphate
  modified_base 7: mod_base = OTHER; note = 2'-O-methyluridine-3'-phosphate
  modified_base 8: mod_base = OTHER; note = 2'-O-methylguanosine-3'-phosphate
  modified_base 9: mod_base = OTHER; note = 2'-O-methylcytidine-3'-phosphate
  modified_base 10: mod_base = OTHER; note = 2'-O-methyladenosine-3'-phosphate
  modified_base 11: mod_base = OTHER; note = 2'-O-methylguanosine-3'-phosphate
  modified_base 12: mod_base = OTHER; note = 2'-O-methyluridine-3'-phosphate
  modified_base 13: mod_base = OTHER; note = 2'-O-methyluridine-3'-phosphate
  modified_base 14: mod_base = OTHER; note = 2'-deoxy-2'-fluoroguanosine-3'-phosphate
  modified_base 15: mod_base = OTHER; note = 2'-O-methylguanosine-3'-phosphate
  modified_base 16: mod_base = OTHER; note = 2'-deoxy-2'-fluoroadenosine-3'-phosphate
  modified_base 17: mod_base = OTHER; note = 2'-O-methyluridine-3'-phosphate
  modified_base 18: mod_base = OTHER; note = 2'-O-methyluridine-3'-phosphate
  modified_base 19: mod_base = OTHER; note = 2'-O-methyluridine-3'-phosphate
  modified_base 20: mod_base = OTHER; note = 2'-O-methyluridine-3'-phosphate
  modified_base 21: mod_base = OTHER; note = 2'-O-methyladenosine-3'-phosphorothioate
  modified_base 22: mod_base = OTHER; note = 2'-O-methylguanosine-3'-phosphorothioate
  modified_base 23: mod_base = OTHER; note = 2'-O-methylcytidine
tccaattgcagttggattttagc

SEQ ID NO: 13262 - RNA, 23 nt, synthetic construct
  source 1..23: mol_type = other RNA
  modified_base 1: mod_base = OTHER; note = 2'-O-methyluridine-3'-phosphorothioate 5'-(E)-Vinylphosphonate
  modified_base 2: mod_base = OTHER; note = 2'-deoxy-2'-fluoroguanosine-3'-phosphorothioate
  modified_base 3: mod_base = OTHER; note = 2'-O-methylcytidine-3'-phosphate
  modified_base 4: mod_base = OTHER; note = 2'-O-methylcytidine-3'-phosphate
  modified_base 5: mod_base = OTHER; note = 2'-O-methyladenosine-3'-phosphate
  modified_base 6: mod_base = OTHER; note = 2'-deoxy-2'-fluoroadenosine-3'-phosphate
  modified_base 7: mod_base = OTHER; note = 2'-O-methyluridine-3'-phosphate
  modified_base 8: mod_base = OTHER; note = 2'-O-methyluridine-3'-phosphate
  modified_base 9: mod_base = OTHER; note = 2'-O-methylguanosine-3'-phosphate
  modified_base 10: mod_base = OTHER; note = 2'-O-methylcytidine-3'-phosphate
  modified_base 11: mod_base = OTHER; note = 2'-O-methyladenosine-3'-phosphate
  modified_base 12: mod_base = OTHER; note = 2'-O-methylguanosine-3'-phosphate
  modified_base 13: mod_base = OTHER; note = 2'-O-methyluridine-3'-phosphate
  modified_base 14: mod_base = OTHER; note = 2'-deoxy-2'-fluorouridine-3'-phosphate
  modified_base 15: mod_base = OTHER; note = 2'-O-methylguanosine-3'-phosphate
  modified_base 16: mod_base = OTHER; note = 2'-deoxy-2'-fluoroguanosine-3'-phosphate
  modified_base 17: mod_base = OTHER; note = 2'-O-methyladenosine-3'-phosphate
  modified_base 18: mod_base = OTHER; note = 2'-O-methyluridine-3'-phosphate
  modified_base 19: mod_base = OTHER; note = 2'-O-methyluridine-3'-phosphate
  modified_base 20: mod_base = OTHER; note = 2'-O-methyluridine-3'-phosphate
  modified_base 21: mod_base = OTHER; note = 2'-O-methyluridine-3'-phosphorothioate
  modified_base 22: mod_base = OTHER; note = 2'-O-methyladenosine-3'-phosphorothioate
  modified_base 23: mod_base = OTHER; note = 2'-O-methylguanosine
tgccaattgcagttggattttag

SEQ ID NO: 13263 - RNA, 23 nt, synthetic construct
  source 1..23: mol_type = other RNA
  modified_base 1: mod_base = OTHER; note = 2'-O-methyluridine-3'-phosphorothioate 5'-(E)-Vinylphosphonate
  modified_base 2: mod_base = OTHER; note = 2'-deoxy-2'-fluoroadenosine-3'-phosphorothioate
  modified_base 3: mod_base = OTHER; note = 2'-O-methylguanosine-3'-phosphate
  modified_base 4: mod_base = OTHER; note = 2'-O-methylcytidine-3'-phosphate
  modified_base 5: mod_base = OTHER; note = 2'-O-methylcytidine-3'-phosphate
  modified_base 6: mod_base = OTHER; note = 2'-deoxy-2'-fluoroadenosine-3'-phosphate
  modified_base 7: mod_base = OTHER; note = 2'-O-methyladenosine-3'-phosphate
  modified_base 8: mod_base = OTHER; note = 2'-O-methyluridine-3'-phosphate
  modified_base 9: mod_base = OTHER; note = 2'-O-methyluridine-3'-phosphate
  modified_base 10: mod_base = OTHER; note = 2'-O-methylguanosine-3'-phosphate
  modified_base 11: mod_base = OTHER; note = 2'-O-methylcytidine-3'-phosphate
  modified_base 12: mod_base = OTHER; note = 2'-O-methyladenosine-3'-phosphate
  modified_base 13: mod_base = OTHER; note = 2'-O-methylguanosine-3'-phosphate
  modified_base 14: mod_base = OTHER; note = 2'-deoxy-2'-fluorouridine-3'-phosphate
  modified_base 15: mod_base = OTHER; note = 2'-O-methyluridine-3'-phosphate
  modified_base 16: mod_base = OTHER; note = 2'-deoxy-2'-fluoroguanosine-3'-phosphate
  modified_base 17: mod_base = OTHER; note = 2'-O-methylguanosine-3'-phosphate
  modified_base 18: mod_base = OTHER; note = 2'-O-methyladenosine-3'-phosphate
  modified_base 19: mod_base = OTHER; note = 2'-O-methyluridine-3'-phosphate
  modified_base 20: mod_base = OTHER; note = 2'-O-methyluridine-3'-phosphate
  modified_base 21: mod_base = OTHER; note = 2'-O-methyluridine-3'-phosphorothioate
  modified_base 22: mod_base = OTHER; note = 2'-O-methyluridine-3'-phosphorothioate
  modified_base 23: mod_base = OTHER; note = 2'-O-methyladenosine
tagccaattgcagttggatttta

SEQ ID NO: 13264 - RNA, 23 nt, synthetic construct
  source 1..23: mol_type = other RNA
  modified_base 1: mod_base = OTHER; note = 2'-O-methyluridine-3'-phosphorothioate 5'-(E)-Vinylphosphonate
  modified_base 2: mod_base = OTHER; note = 2'-deoxy-2'-fluoroguanosine-3'-phosphorothioate
  modified_base 3: mod_base = OTHER; note = 2'-O-methyladenosine-3'-phosphate
  modified_base 4: mod_base = OTHER; note = 2'-O-methylguanosine-3'-phosphate
  modified_base 5: mod_base = OTHER; note = 2'-O-methylcytidine-3'-phosphate
  modified_base 6: mod_base = OTHER; note = 2'-deoxy-2'-fluorocytidine-3'-phosphate
  modified_base 7: mod_base = OTHER; note = 2'-O-methyladenosine-3'-phosphate
  modified_base 8: mod_base = OTHER; note = 2'-O-methyladenosine-3'-phosphate
  modified_base 9: mod_base = OTHER; note = 2'-O-methyluridine-3'-phosphate
  modified_base 10: mod_base = OTHER; note = 2'-O-methyluridine-3'-phosphate
  modified_base 11: mod_base = OTHER; note = 2'-O-methylguanosine-3'-phosphate
  modified_base 12: mod_base = OTHER; note = 2'-O-methylcytidine-3'-phosphate
  modified_base 13: mod_base = OTHER; note = 2'-O-methyladenosine-3'-phosphate
  modified_base 14: mod_base = OTHER; note = 2'-deoxy-2'-fluoroguanosine-3'-phosphate
  modified_base 15: mod_base = OTHER; note = 2'-O-methyluridine-3'-phosphate
  modified_base 16: mod_base = OTHER; note = 2'-deoxy-2'-fluorouridine-3'-phosphate
  modified_base 17: mod_base = OTHER; note = 2'-O-methylguanosine-3'-phosphate
  modified_base 18: mod_base = OTHER; note = 2'-O-methylguanosine-3'-phosphate
  modified_base 19: mod_base = OTHER; note = 2'-O-methyladenosine-3'-phosphate
  modified_base 20: mod_base = OTHER; note = 2'-O-methyluridine-3'-phosphate
  modified_base 21: mod_base = OTHER; note = 2'-O-methyluridine-3'-phosphorothioate
  modified_base 22: mod_base = OTHER; note = 2'-O-methyluridine-3'-phosphorothioate
  modified_base 23: mod_base = OTHER; note = 2'-O-methyluridine
tgagccaattgcagttggatttt

SEQ ID NO: 13265 - RNA, 23 nt, synthetic construct
  source 1..23: mol_type = other RNA
  modified_base 1: mod_base = OTHER; note = 2'-O-methyluridine-3'-phosphorothioate 5'-(E)-Vinylphosphonate
  modified_base 2: mod_base = OTHER; note = 2'-deoxy-2'-fluoroguanosine-3'-phosphorothioate
  modified_base 3: mod_base = OTHER; note = 2'-O-methylguanosine-3'-phosphate
  modified_base 4: mod_base = OTHER; note = 2'-O-methyladenosine-3'-phosphate
  modified_base 5: mod_base = OTHER; note = 2'-O-methylguanosine-3'-phosphate
  modified_base 6: mod_base = OTHER; note = 2'-deoxy-2'-fluorocytidine-3'-phosphate
  modified_base 7: mod_base = OTHER; note = 2'-O-methylcytidine-3'-phosphate
  modified_base 8: mod_base = OTHER; note = 2'-O-methyladenosine-3'-phosphate
  modified_base 9: mod_base = OTHER; note = 2'-O-methyladenosine-3'-phosphate
  modified_base 10: mod_base = OTHER; note = 2'-O-methyluridine-3'-phosphate
  modified_base 11: mod_base = OTHER; note = 2'-O-methyluridine-3'-phosphate
  modified_base 12: mod_base = OTHER; note = 2'-O-methylguanosine-3'-phosphate
  modified_base 13: mod_base = OTHER; note = 2'-O-methylcytidine-3'-phosphate
  modified_base 14: mod_base = OTHER; note = 2'-deoxy-2'-fluoroadenosine-3'-phosphate
  modified_base 15: mod_base = OTHER; note = 2'-O-methylguanosine-3'-phosphate
  modified_base 16: mod_base = OTHER; note = 2'-deoxy-2'-fluorouridine-3'-phosphate
  modified_base 17: mod_base = OTHER; note = 2'-O-methyluridine-3'-phosphate
  modified_base 18: mod_base = OTHER; note = 2'-O-methylguanosine-3'-phosphate
  modified_base 19: mod_base = OTHER; note = 2'-O-methylguanosine-3'-phosphate
  modified_base 20: mod_base = OTHER; note = 2'-O-methyladenosine-3'-phosphate
  modified_base 21: mod_base = OTHER; note = 2'-O-methyluridine-3'-phosphorothioate
  modified_base 22: mod_base = OTHER; note = 2'-O-methyluridine-3'-phosphorothioate
  modified_base 23: mod_base = OTHER; note = 2'-O-methyluridine
tggagccaattgcagttggattt

SEQ ID NO: 13266 - RNA, 23 nt, synthetic construct
  source 1..23: mol_type = other RNA
  modified_base 1: mod_base = OTHER; note = 2'-O-methyluridine-3'-phosphorothioate 5'-(E)-Vinylphosphonate
  modified_base 2: mod_base = OTHER; note = 2'-deoxy-2'-fluoroguanosine-3'-phosphorothioate
  modified_base 3: mod_base = OTHER; note = 2'-O-methylguanosine-3'-phosphate
  modified_base 4: mod_base = OTHER; note = 2'-O-methylguanosine-3'-phosphate
  modified_base 5: mod_base = OTHER; note = 2'-O-methyladenosine-3'-phosphate
  modified_base 6: mod_base = OTHER; note = 2'-deoxy-2'-fluoroguanosine-3'-phosphate
  modified_base 7: mod_base = OTHER; note = 2'-O-methylcytidine-3'-phosphate
  modified_base 8: mod_base = OTHER; note = 2'-O-methylcytidine-3'-phosphate
  modified_base 9: mod_base = OTHER; note = 2'-O-methyladenosine-3'-phosphate
  modified_base 10: mod_base = OTHER; note = 2'-O-methyladenosine-3'-phosphate
  modified_base 11: mod_base = OTHER; note = 2'-O-methyluridine-3'-phosphate
  modified_base 12: mod_base = OTHER; note = 2'-O-methyluridine-3'-phosphate
  modified_base 13: mod_base = OTHER; note = 2'-O-methylguanosine-3'-phosphate
  modified_base 14: mod_base = OTHER; note = 2'-deoxy-2'-fluorocytidine-3'-phosphate
  modified_base 15: mod_base = OTHER; note = 2'-O-methyladenosine-3'-phosphate
  modified_base 16: mod_base = OTHER; note = 2'-deoxy-2'-fluoroguanosine-3'-phosphate
  modified_base 17: mod_base = OTHER; note = 2'-O-methyluridine-3'-phosphate
  modified_base 18: mod_base = OTHER; note = 2'-O-methyluridine-3'-phosphate
  modified_base 19: mod_base = OTHER; note = 2'-O-methylguanosine-3'-phosphate
  modified_base 20: mod_base = OTHER; note = 2'-O-methylguanosine-3'-phosphate
  modified_base 21: mod_base = OTHER; note = 2'-O-methyladenosine-3'-phosphorothioate
  modified_base 22: mod_base = OTHER; note = 2'-O-methyluridine-3'-phosphorothioate
  modified_base 23: mod_base = OTHER; note = 2'-O-methyluridine
tgggagccaattgcagttggatt

SEQ ID NO: 13267 - RNA, 23 nt, synthetic construct
  source 1..23: mol_type = other RNA
  modified_base 1: mod_base = OTHER; note = 2'-O-methyluridine-3'-phosphorothioate 5'-(E)-Vinylphosphonate
  modified_base 2: mod_base = OTHER; note = 2'-deoxy-2'-fluoroadenosine-3'-phosphorothioate
  modified_base 3: mod_base = OTHER; note = 2'-O-methyladenosine-3'-phosphate
  modified_base 4: mod_base = OTHER; note = 2'-O-methylguanosine-3'-phosphate
  modified_base 5: mod_base = OTHER; note = 2'-O-methylcytidine-3'-phosphate
  modified_base 6: mod_base = OTHER; note = 2'-deoxy-2'-fluorocytidine-3'-phosphate
  modified_base 7: mod_base = OTHER; note = 2'-O-methyladenosine-3'-phosphate
  modified_base 8: mod_base = OTHER; note = 2'-O-methyladenosine-3'-phosphate
  modified_base 9: mod_base = OTHER; note = 2'-O-methyluridine-3'-phosphate
  modified_base 10: mod_base = OTHER; note = 2'-O-methyladenosine-3'-phosphate
  modified_base 11: mod_base = OTHER; note = 2'-O-methyladenosine-3'-phosphate
  modified_base 12: mod_base = OTHER; note = 2'-O-methylguanosine-3'-phosphate
  modified_base 13: mod_base = OTHER; note = 2'-O-methyladenosine-3'-phosphate
  modified_base 14: mod_base = OTHER; note = 2'-deoxy-2'-fluorouridine-3'-phosphate
  modified_base 15: mod_base = OTHER; note = 2'-O-methylguanosine-3'-phosphate
  modified_base 16: mod_base = OTHER; note = 2'-deoxy-2'-fluorocytidine-3'-phosphate
  modified_base 17: mod_base = OTHER; note = 2'-O-methyluridine-3'-phosphate
  modified_base 18: mod_base = OTHER; note = 2'-O-methyluridine-3'-phosphate
  modified_base 19: mod_base = OTHER; note = 2'-O-methylcytidine-3'-phosphate
  modified_base 20: mod_base = OTHER; note = 2'-O-methyluridine-3'-phosphate
  modified_base 21: mod_base = OTHER; note = 2'-O-methylcytidine-3'-phosphorothioate
  modified_base 22: mod_base = OTHER; note = 2'-O-methyluridine-3'-phosphorothioate
  modified_base 23: mod_base = OTHER; note = 2'-O-methylguanosine
taagccaataagatgcttctctg

SEQ ID NO: 13268 - RNA, 23 nt, synthetic construct
  source 1..23: mol_type = other RNA
  modified_base 1: mod_base = OTHER; note = 2'-O-methyluridine-3'-phosphorothioate 5'-(E)-Vinylphosphonate
  modified_base 2: mod_base = OTHER; note = 2'-deoxy-2'-fluorouridine-3'-phosphorothioate
  modified_base 3: mod_base = OTHER; note = 2'-O-methyladenosine-3'-phosphate
  modified_base 4: mod_base = OTHER; note = 2'-O-methyluridine-3'-phosphate
  modified_base 5: mod_base = OTHER; note = 2'-O-methyladenosine-3'-phosphate
  modified_base 6: mod_base = OTHER; note = 2'-deoxy-2'-fluoroadenosine-3'-phosphate
  modified_base 7: mod_base = OTHER; note = 2'-O-methylguanosine-3'-phosphate
  modified_base 8: mod_base = OTHER; note = 2'-O-methylcytidine-3'-phosphate
  modified_base 9: mod_base = OTHER; note = 2'-O-methylcytidine-3'-phosphate
  modified_base 10: mod_base = OTHER; note = 2'-O-methyladenosine-3'-phosphate
  modified_base 11: mod_base = OTHER; note = 2'-O-methyladenosine-3'-phosphate
  modified_base 12: mod_base = OTHER; note = 2'-O-methyluridine-3'-phosphate
  modified_base 13: mod_base = OTHER; note = 2'-O-methyladenosine-3'-phosphate
  modified_base 14: mod_base = OTHER; note = 2'-deoxy-2'-fluoroadenosine-3'-phosphate
  modified_base 15: mod_base = OTHER; note = 2'-O-methylguanosine-3'-phosphate
  modified_base 16: mod_base = OTHER; note = 2'-deoxy-2'-fluoroadenosine-3'-phosphate
  modified_base 17: mod_base = OTHER; note = 2'-O-methyluridine-3'-phosphate
  modified_base 18: mod_base = OTHER; note = 2'-O-methylguanosine-3'-phosphate
  modified_base 19: mod_base = OTHER; note = 2'-O-methylcytidine-3'-phosphate
  modified_base 20: mod_base = OTHER; note = 2'-O-methyluridine-3'-phosphate
  modified_base 21: mod_base = OTHER; note = 2'-O-methyluridine-3'-phosphorothioate
  modified_base 22: mod_base = OTHER; note = 2'-O-methylcytidine-3'-phosphorothioate
  modified_base 23: mod_base = OTHER; note = 2'-O-methyluridine
ttataagccaataagatgcttct

SEQ ID NO: 13269 - RNA, 23 nt, synthetic construct
  source 1..23: mol_type = other RNA
  modified_base 1: mod_base = OTHER; note = 2'-O-methyluridine-3'-phosphorothioate 5'-(E)-Vinylphosphonate
  modified_base 2: mod_base = OTHER; note = 2'-deoxy-2'-fluoroadenosine-3'-phosphorothioate
  modified_base 3: mod_base = OTHER; note = 2'-O-methyluridine-3'-phosphate
  modified_base 4: mod_base = OTHER; note = 2'-O-methyladenosine-3'-phosphate
  modified_base 5: mod_base = OTHER; note = 2'-O-methyluridine-3'-phosphate
  modified_base 6: mod_base = OTHER; note = 2'-deoxy-2'-fluoroadenosine-3'-phosphate
  modified_base 7: mod_base = OTHER; note = 2'-O-methyladenosine-3'-phosphate
  modified_base 8: mod_base = OTHER; note = 2'-O-methylguanosine-3'-phosphate
  modified_base 9: mod_base = OTHER; note = 2'-O-methylcytidine-3'-phosphate
  modified_base 10: mod_base = OTHER; note = 2'-O-methylcytidine-3'-phosphate
  modified_base 11: mod_base = OTHER; note = 2'-O-methyladenosine-3'-phosphate
  modified_base 12: mod_base = OTHER; note = 2'-O-methyladenosine-3'-phosphate
  modified_base 13: mod_base = OTHER; note = 2'-O-methyluridine-3'-phosphate
  modified_base 14: mod_base = OTHER; note = 2'-deoxy-2'-fluoroadenosine-3'-phosphate
  modified_base 15: mod_base = OTHER; note = 2'-O-methyladenosine-3'-phosphate
  modified_base 16: mod_base = OTHER; note = 2'-deoxy-2'-fluoroguanosine-3'-phosphate
  modified_base 17: mod_base = OTHER; note = 2'-O-methyladenosine-3'-phosphate
  modified_base 18: mod_base = OTHER; note = 2'-O-methyluridine-3'-phosphate
  modified_base 19: mod_base = OTHER; note = 2'-O-methylguanosine-3'-phosphate
  modified_base 20: mod_base = OTHER; note = 2'-O-methylcytidine-3'-phosphate
  modified_base 21: mod_base = OTHER; note = 2'-O-methyluridine-3'-phosphorothioate
  modified_base 22: mod_base = OTHER; note = 2'-O-methyluridine-3'-phosphorothioate
  modified_base 23: mod_base = OTHER; note = 2'-O-methylcytidine
tatataagccaataagatgcttc

SEQ ID NO: 13270 - RNA, 23 nt, synthetic construct
  source 1..23: mol_type = other RNA
  modified_base 1: mod_base = OTHER; note = 2'-O-methyluridine-3'-phosphorothioate 5'-(E)-Vinylphosphonate
  modified_base 2: mod_base = OTHER; note = 2'-deoxy-2'-fluorouridine-3'-phosphorothioate
  modified_base 3: mod_base = OTHER; note = 2'-O-methylcytidine-3'-phosphate
  modified_base 4: mod_base = OTHER; note = 2'-O-methyluridine-3'-phosphate
  modified_base 5: mod_base = OTHER; note = 2'-O-methylcytidine-3'-phosphate
  modified_base 6: mod_base = OTHER; note = 2'-deoxy-2'-fluoroadenosine-3'-phosphate
  modified_base 7: mod_base = OTHER; note = 2'-O-methyluridine-3'-phosphate
  modified_base 8: mod_base = OTHER; note = 2'-O-methyluridine-3'-phosphate
  modified_base 9: mod_base = OTHER; note = 2'-O-methyluridine-3'-phosphate
  modified_base 10: mod_base = OTHER; note = 2'-O-methyluridine-3'-phosphate
  modified_base 11: mod_base = OTHER; note = 2'-O-methylcytidine-3'-phosphate
  modified_base 12: mod_base = OTHER; note = 2'-O-methyluridine-3'-phosphate
  modified_base 13: mod_base = OTHER; note = 2'-O-methylguanosine-3'-phosphate
  modified_base 14: mod_base = OTHER; note = 2'-deoxy-2'-fluoroadenosine-3'-phosphate
  modified_base 15: mod_base = OTHER; note = 2'-O-methyladenosine-3'-phosphate
  modified_base 16: mod_base = OTHER; note = 2'-deoxy-2'-fluoroguanosine-3'-phosphate
  modified_base 17: mod_base = OTHER; note = 2'-O-methyladenosine-3'-phosphate
  modified_base 18: mod_base = OTHER; note = 2'-O-methyluridine-3'-phosphate
  modified_base 19: mod_base = OTHER; note = 2'-O-methylguanosine-3'-phosphate
  modified_base 20: mod_base = OTHER; note = 2'-O-methyluridine-3'-phosphate
  modified_base 21: mod_base = OTHER; note = 2'-O-methyladenosine-3'-phosphorothioate
  modified_base 22: mod_base = OTHER; note = 2'-O-methyluridine-3'-phosphorothioate
  modified_base 23: mod_base = OTHER; note = 2'-O-methyladenosine
ttctcattttctgaagatgtata

SEQ ID NO: 13271 - RNA, 23 nt, synthetic construct
  source 1..23: mol_type = other RNA
  modified_base 1: mod_base = OTHER; note = 2'-O-methyluridine-3'-phosphorothioate 5'-(E)-Vinylphosphonate
  modified_base 2: mod_base = OTHER; note = 2'-deoxy-2'-fluorouridine-3'-phosphorothioate
  modified_base 3: mod_base = OTHER; note = 2'-O-methyluridine-3'-phosphate
  modified_base 4: mod_base = OTHER; note = 2'-O-methylcytidine-3'-phosphate
  modified_base 5: mod_base = OTHER; note = 2'-O-methyluridine-3'-phosphate
  modified_base 6: mod_base = OTHER; note = 2'-deoxy-2'-fluorocytidine-3'-phosphate
  modified_base 7: mod_base = OTHER; note = 2'-O-methyladenosine-3'-phosphate
  modified_base 8: mod_base = OTHER; note = 2'-O-methyluridine-3'-phosphate
  modified_base 9: mod_base = OTHER; note = 2'-O-methyluridine-3'-phosphate
  modified_base 10: mod_base = OTHER; note = 2'-O-methyluridine-3'-phosphate
  modified_base 11: mod_base = OTHER; note = 2'-O-methyluridine-3'-phosphate
  modified_base 12: mod_base = OTHER; note = 2'-O-methylcytidine-3'-phosphate
  modified_base 13: mod_base = OTHER; note = 2'-O-methyluridine-3'-phosphate
  modified_base 14: mod_base = OTHER; note = 2'-deoxy-2'-fluoroguanosine-3'-phosphate
  modified_base 15: mod_base = OTHER; note = 2'-O-methyladenosine-3'-phosphate
  modified_base 16: mod_base = OTHER; note = 2'-deoxy-2'-fluoroadenosine-3'-phosphate
  modified_base 17: mod_base = OTHER; note = 2'-O-methylguanosine-3'-phosphate
  modified_base 18: mod_base = OTHER; note = 2'-O-methyladenosine-3'-phosphate
  modified_base 19: mod_base = OTHER; note = 2'-O-methyluridine-3'-phosphate
  modified_base 20: mod_base = OTHER; note = 2'-O-methylguanosine-3'-phosphate
  modified_base 21: mod_base = OTHER; note = 2'-O-methyluridine-3'-phosphorothioate
  modified_base 22: mod_base = OTHER; note = 2'-O-methyladenosine-3'-phosphorothioate
  modified_base 23: mod_base = OTHER; note = 2'-O-methyluridine
tttctcattttctgaagatgtat

SEQ ID NO: 13272 - RNA, 23 nt, synthetic construct
  source 1..23: mol_type = other RNA
  modified_base 1: mod_base = OTHER; note = 2'-O-methyluridine-3'-phosphorothioate 5'-(E)-Vinylphosphonate
  modified_base 2: mod_base = OTHER; note = 2'-deoxy-2'-fluoroadenosine-3'-phosphorothioate
  modified_base 3: mod_base = OTHER; note = 2'-O-methyluridine-3'-phosphate
  modified_base 4: mod_base = OTHER; note = 2'-O-methyluridine-3'-phosphate
  modified_base 5: mod_base = OTHER; note = 2'-O-methylcytidine-3'-phosphate
  modified_base 6: mod_base = OTHER; note = 2'-deoxy-2'-fluorouridine-3'-phosphate
  modified_base 7: mod_base = OTHER; note = 2'-O-methylcytidine-3'-phosphate
  modified_base 8: mod_base = OTHER; note = 2'-O-methyladenosine-3'-phosphate
  modified_base 9: mod_base = OTHER; note = 2'-O-methyluridine-3'-phosphate
  modified_base 10: mod_base = OTHER; note = 2'-O-methyluridine-3'-phosphate
  modified_base 11: mod_base = OTHER; note = 2'-O-methyluridine-3'-phosphate
  modified_base 12: mod_base = OTHER; note = 2'-O-methyluridine-3'-phosphate
  modified_base 13: mod_base = OTHER; note = 2'-O-methylcytidine-3'-phosphate
  modified_base 14: mod_base = OTHER; note = 2'-deoxy-2'-fluorouridine-3'-phosphate
  modified_base 15: mod_base = OTHER; note = 2'-O-methylguanosine-3'-phosphate
  modified_base 16: mod_base = OTHER; note = 2'-deoxy-2'-fluoroadenosine-3'-phosphate
  modified_base 17: mod_base = OTHER; note = 2'-O-methyladenosine-3'-phosphate
  modified_base 18: mod_base = OTHER; note = 2'-O-methylguanosine-3'-phosphate
  modified_base 19: mod_base = OTHER; note = 2'-O-methyladenosine-3'-phosphate
  modified_base 20: mod_base = OTHER; note = 2'-O-methyluridine-3'-phosphate
  modified_base 21: mod_base = OTHER; note = 2'-O-methylguanosine-3'-phosphorothioate
  modified_base 22: mod_base = OTHER; note = 2'-O-methyluridine-3'-phosphorothioate
  modified_base 23: mod_base = OTHER; note = 2'-O-methyladenosine
tattctcattttctgaagatgta

SEQ ID NO: 13273 - RNA, 23 nt, synthetic construct
  source 1..23: mol_type = other RNA
  modified_base 1: mod_base = OTHER; note = 2'-O-methyluridine-3'-phosphorothioate 5'-(E)-Vinylphosphonate
  modified_base 2: mod_base = OTHER; note = 2'-deoxy-2'-fluoroadenosine-3'-phosphorothioate
  modified_base 3: mod_base = OTHER; note = 2'-O-methyladenosine-3'-phosphate
  modified_base 4: mod_base = OTHER; note = 2'-O-methyluridine-3'-phosphate
  modified_base 5: mod_base = OTHER; note = 2'-O-methyluridine-3'-phosphate
  modified_base 6: mod_base = OTHER; note = 2'-deoxy-2'-fluorocytidine-3'-phosphate
  modified_base 7: mod_base = OTHER; note = 2'-O-methyluridine-3'-phosphate
  modified_base 8: mod_base = OTHER; note = 2'-O-methylcytidine-3'-phosphate
  modified_base 9: mod_base = OTHER; note = 2'-O-methyladenosine-3'-phosphate
  modified_base 10: mod_base = OTHER; note = 2'-O-methyluridine-3'-phosphate
  modified_base 11: mod_base = OTHER; note = 2'-O-methyluridine-3'-phosphate
  modified_base 12: mod_base = OTHER; note = 2'-O-methyluridine-3'-phosphate
  modified_base 13: mod_base = OTHER; note = 2'-O-methyluridine-3'-phosphate
  modified_base 14: mod_base = OTHER; note = 2'-deoxy-2'-fluorocytidine-3'-phosphate
  modified_base 15: mod_base = OTHER; note = 2'-O-methyluridine-3'-phosphate
  modified_base 16: mod_base = OTHER; note = 2'-deoxy-2'-fluoroguanosine-3'-phosphate
  modified_base 17: mod_base = OTHER; note = 2'-O-methyladenosine-3'-phosphate
  modified_base 18: mod_base = OTHER; note = 2'-O-methyladenosine-3'-phosphate
  modified_base 19: mod_base = OTHER; note = 2'-O-methylguanosine-3'-phosphate
  modified_base 20: mod_base = OTHER; note = 2'-O-methyladenosine-3'-phosphate
  modified_base 21: mod_base = OTHER; note = 2'-O-methyluridine-3'-phosphorothioate
  modified_base 22: mod_base = OTHER; note = 2'-O-methylguanosine-3'-phosphorothioate
  modified_base 23: mod_base = OTHER; note = 2'-O-methyluridine
taattctcattttctgaagatgt

SEQ ID NO: 13274 - RNA, 23 nt, synthetic construct
  source 1..23: mol_type = other RNA
  modified_base 1: mod_base = OTHER; note = 2'-O-methyluridine-3'-phosphorothioate 5'-(E)-Vinylphosphonate
  modified_base 2: mod_base = OTHER; note = 2'-deoxy-2'-fluorouridine-3'-phosphorothioate
  modified_base 3: mod_base = OTHER; note = 2'-O-methyladenosine-3'-phosphate
  modified_base 4: mod_base = OTHER; note = 2'-O-methyladenosine-3'-phosphate
  modified_base 5: mod_base = OTHER; note = 2'-O-methyluridine-3'-phosphate
  modified_base 6: mod_base = OTHER; note = 2'-deoxy-2'-fluorouridine-3'-phosphate
  modified_base 7: mod_base = OTHER; note = 2'-O-methylcytidine-3'-phosphate
  modified_base 8: mod_base = OTHER; note = 2'-O-methyluridine-3'-phosphate
  modified_base 9: mod_base = OTHER; note = 2'-O-methylcytidine-3'-phosphate
  modified_base 10: mod_base = OTHER; note = 2'-O-methyladenosine-3'-phosphate
  modified_base 11: mod_base = OTHER; note = 2'-O-methyluridine-3'-phosphate
  modified_base 12: mod_base = OTHER; note = 2'-O-methyluridine-3'-phosphate
  modified_base 13: mod_base = OTHER; note = 2'-O-methyluridine-3'-phosphate
  modified_base 14: mod_base = OTHER; note = 2'-deoxy-2'-fluorouridine-3'-phosphate
  modified_base 15: mod_base = OTHER; note = 2'-O-methylcytidine-3'-phosphate
  modified_base 16: mod_base = OTHER; note = 2'-deoxy-2'-fluorouridine-3'-phosphate
  modified_base 17: mod_base = OTHER; note = 2'-O-methylguanosine-3'-phosphate
  modified_base 18: mod_base = OTHER; note = 2'-O-methyladenosine-3'-phosphate
  modified_base 19: mod_base = OTHER; note = 2'-O-methyladenosine-3'-phosphate
  modified_base 20: mod_base = OTHER; note = 2'-O-methylguanosine-3'-phosphate
  modified_base 21: mod_base = OTHER; note = 2'-O-methyladenosine-3'-phosphorothioate
  modified_base 22: mod_base = OTHER; note = 2'-O-methyluridine-3'-phosphorothioate
  modified_base 23: mod_base = OTHER; note = 2'-O-methylguanosine
ttaattctcattttctgaagatg

SEQ ID NO: 13275 - RNA, 23 nt, synthetic construct
  source 1..23: mol_type = other RNA
  modified_base 1: mod_base = OTHER; note = 2'-O-methyluridine-3'-phosphorothioate 5'-(E)-Vinylphosphonate
  modified_base 2: mod_base = OTHER; note = 2'-deoxy-2'-fluoroadenosine-3'-phosphorothioate
  modified_base 3: mod_base = OTHER; note = 2'-O-methyladenosine-3'-phosphate
  modified_base 4: mod_base = OTHER; note = 2'-O-methylguanosine-3'-phosphate
  modified_base 5: mod_base = OTHER; note = 2'-O-methyluridine-3'-phosphate
  modified_base 6: mod_base = OTHER; note = 2'-deoxy-2'-fluorouridine-3'-phosphate
  modified_base 7: mod_base = OTHER; note = 2'-O-methylcytidine-3'-phosphate
  modified_base 8: mod_base = OTHER; note = 2'-O-methyluridine-3'-phosphate
  modified_base 9: mod_base = OTHER; note = 2'-O-methyluridine-3'-phosphate
  modified_base 10: mod_base = OTHER; note = 2'-O-methyluridine-3'-phosphate
  modified_base 11: mod_base = OTHER; note = 2'-O-methylguanosine-3'-phosphate
  modified_base 12: mod_base = OTHER; note = 2'-O-methyluridine-3'-phosphate
  modified_base 13: mod_base = OTHER; note = 2'-O-methyluridine-3'-phosphate
  modified_base 14: mod_base = OTHER; note = 2'-deoxy-2'-fluorocytidine-3'-phosphate
  modified_base 15: mod_base = OTHER; note = 2'-O-methyladenosine-3'-phosphate
  modified_base 16: mod_base = OTHER; note = 2'-deoxy-2'-fluoroadenosine-3'-phosphate
  modified_base 17: mod_base = OTHER; note = 2'-O-methyluridine-3'-phosphate
  modified_base 18: mod_base = OTHER; note = 2'-O-methylcytidine-3'-phosphate
  modified_base 19: mod_base = OTHER; note = 2'-O-methyluridine-3'-phosphate
  modified_base 20: mod_base = OTHER; note = 2'-O-methylguanosine-3'-phosphate
  modified_base 21: mod_base = OTHER; note = 2'-O-methyluridine-3'-phosphorothioate
  modified_base 22: mod_base = OTHER; note = 2'-O-methyladenosine-3'-phosphorothioate
  modified_base 23: mod_base = OTHER; note = 2'-O-methylguanosine
taagttctttgttcaatctgtag

SEQ ID NO: 13276 - RNA, 23 nt, synthetic construct
  source 1..23: mol_type = other RNA
  modified_base 1: mod_base = OTHER; note = 2'-O-methyluridine-3'-phosphorothioate 5'-(E)-Vinylphosphonate
  modified_base 2: mod_base = OTHER; note = 2'-deoxy-2'-fluorouridine-3'-phosphorothioate
  modified_base 3: mod_base = OTHER; note = 2'-O-methyladenosine-3'-phosphate
  modified_base 4: mod_base = OTHER; note = 2'-O-methyladenosine-3'-phosphate
  modified_base 5: mod_base = OTHER; note = 2'-O-methylguanosine-3'-phosphate
  modified_base 6: mod_base = OTHER; note = 2'-deoxy-2'-fluorouridine-3'-phosphate
  modified_base 7: mod_base = OTHER; note = 2'-O-methyluridine-3'-phosphate
  modified_base 8: mod_base = OTHER; note = 2'-O-methylcytidine-3'-phosphate
  modified_base 9: mod_base = OTHER; note = 2'-O-methyluridine-3'-phosphate
  modified_base 10: mod_base = OTHER; note = 2'-O-methyluridine-3'-phosphate
  modified_base 11: mod_base = OTHER; note = 2'-O-methyluridine-3'-phosphate
  modified_base 12: mod_base = OTHER; note = 2'-O-methylguanosine-3'-phosphate
  modified_base 13: mod_base = OTHER; note = 2'-O-methyluridine-3'-phosphate
  modified_base 14: mod_base = OTHER; note = 2'-deoxy-2'-fluorouridine-3'-phosphate
  modified_base 15: mod_base = OTHER; note = 2'-O-methylcytidine-3'-phosphate
  modified_base 16: mod_base = OTHER; note = 2'-deoxy-2'-fluoroadenosine-3'-phosphate
  modified_base 17: mod_base = OTHER; note = 2'-O-methyladenosine-3'-phosphate
  modified_base 18: mod_base = OTHER; note = 2'-O-methyluridine-3'-phosphate
  modified_base 19: mod_base = OTHER; note = 2'-O-methylcytidine-3'-phosphate
  modified_base 20: mod_base = OTHER; note = 2'-O-methyluridine-3'-phosphate
  modified_base 21: mod_base = OTHER; note = 2'-O-methylguanosine-3'-phosphorothioate
  modified_base 22: mod_base = OTHER; note = 2'-O-methyluridine-3'-phosphorothioate
  modified_base 23: mod_base = OTHER; note = 2'-O-methyladenosine
ttaagttctttgttcaatctgta

SEQ ID NO: 13277 - RNA, 23 nt, synthetic construct
  source 1..23: mol_type = other RNA
  modified_base 1: mod_base = OTHER; note = 2'-O-methyluridine-3'-phosphorothioate 5'-(E)-Vinylphosphonate
  modified_base 2: mod_base = OTHER; note = 2'-deoxy-2'-fluorocytidine-3'-phosphorothioate
  modified_base 3: mod_base = OTHER; note = 2'-O-methyluridine-3'-phosphate
  modified_base 4: mod_base = OTHER; note = 2'-O-methyladenosine-3'-phosphate
  modified_base 5: mod_base = OTHER; note = 2'-O-methyladenosine-3'-phosphate
  modified_base 6: mod_base = OTHER; note = 2'-deoxy-2'-fluoroguanosine-3'-phosphate
  modified_base 7: mod_base = OTHER; note = 2'-O-methyluridine-3'-phosphate
  modified_base 8: mod_base = OTHER; note = 2'-O-methyluridine-3'-phosphate
  modified_base 9: mod_base = OTHER; note = 2'-O-methylcytidine-3'-phosphate
  modified_base 10: mod_base = OTHER; note = 2'-O-methyluridine-3'-phosphate
  modified_base 11: mod_base = OTHER; note = 2'-O-methyluridine-3'-phosphate
  modified_base 12: mod_base = OTHER; note = 2'-O-methyluridine-3'-phosphate
  modified_base 13: mod_base = OTHER; note = 2'-O-methylguanosine-3'-phosphate
  modified_base 14: mod_base = OTHER; note = 2'-deoxy-2'-fluorouridine-3'-phosphate
  modified_base 15: mod_base = OTHER; note = 2'-O-methyluridine-3'-phosphate
  modified_base 16: mod_base = OTHER; note = 2'-deoxy-2'-fluorocytidine-3'-phosphate
  modified_base 17: mod_base = OTHER; note = 2'-O-methyladenosine-3'-phosphate
  modified_base 18: mod_base = OTHER; note = 2'-O-methyladenosine-3'-phosphate
  modified_base 19: mod_base = OTHER; note = 2'-O-methyluridine-3'-phosphate
  modified_base 20: mod_base = OTHER; note = 2'-O-methylcytidine-3'-phosphate
  modified_base 21: mod_base = OTHER; note = 2'-O-methyluridine-3'-phosphorothioate
  modified_base 22: mod_base = OTHER; note = 2'-O-methylguanosine-3'-phosphorothioate
  modified_base 23: mod_base = OTHER; note = 2'-O-methyluridine
tctaagttctttgttcaatctgt

SEQ ID NO: 13278 - RNA, 23 nt, synthetic construct
  source 1..23: mol_type = other RNA
  modified_base 1: mod_base = OTHER; note = 2'-O-methyluridine-3'-phosphorothioate 5'-(E)-Vinylphosphonate
  modified_base 2: mod_base = OTHER; note = 2'-deoxy-2'-fluorouridine-3'-phosphorothioate
  modified_base 3: mod_base = OTHER; note = 2'-O-methylcytidine-3'-phosphate
  modified_base 4: mod_base = OTHER; note = 2'-O-methyluridine-3'-phosphate
  modified_base 5: mod_base = OTHER; note = 2'-O-methyladenosine-3'-phosphate
  modified_base 6: mod_base = OTHER; note = 2'-deoxy-2'-fluoroadenosine-3'-phosphate
  modified_base 7: mod_base = OTHER; note = 2'-O-methylguanosine-3'-phosphate
  modified_base 8: mod_base = OTHER; note = 2'-O-methyluridine-3'-phosphate
  modified_base 9: mod_base = OTHER; note = 2'-O-methyluridine-3'-phosphate
  modified_base 10: mod_base = OTHER; note = 2'-O-methylcytidine-3'-phosphate
  modified_base 11: mod_base = OTHER; note = 2'-O-methyluridine-3'-phosphate
  modified_base 12: mod_base = OTHER; note = 2'-O-methyluridine-3'-phosphate
  modified_base 13: mod_base = OTHER; note = 2'-O-methyluridine-3'-phosphate
  modified_base 14: mod_base = OTHER; note = 2'-deoxy-2'-fluoroguanosine-3'-phosphate
  modified_base 15: mod_base = OTHER; note = 2'-O-methyluridine-3'-phosphate
  modified_base 16: mod_base = OTHER; note = 2'-deoxy-2'-fluorouridine-3'-phosphate
  modified_base 17: mod_base = OTHER; note = 2'-O-methylcytidine-3'-phosphate
  modified_base 18: mod_base = OTHER; note = 2'-O-methyladenosine-3'-phosphate
  modified_base 19: mod_base = OTHER; note = 2'-O-methyladenosine-3'-phosphate
  modified_base 20: mod_base = OTHER; note = 2'-O-methyluridine-3'-phosphate
  modified_base 21: mod_base = OTHER; note = 2'-O-methylcytidine-3'-phosphorothioate
  modified_base 22: mod_base = OTHER; note = 2'-O-methyluridine-3'-phosphorothioate
  modified_base 23: mod_base = OTHER; note = 2'-O-methylguanosine
ttctaagttctttgttcaatctg

SEQ ID NO: 13279 - RNA, 23 nt, synthetic construct
  source 1..23: mol_type = other RNA
  modified_base 1: mod_base = OTHER; note = 2'-O-methyluridine-3'-phosphorothioate 5'-(E)-Vinylphosphonate
  modified_base 2: mod_base = OTHER; note = 2'-deoxy-2'-fluorouridine-3'-phosphorothioate
  modified_base 3: mod_base = OTHER; note = 2'-O-methyluridine-3'-phosphate
  modified_base 4: mod_base = OTHER; note = 2'-O-methylcytidine-3'-phosphate
  modified_base 5: mod_base = OTHER; note = 2'-O-methyluridine-3'-phosphate
  modified_base 6: mod_base = OTHER; note = 2'-deoxy-2'-fluoroadenosine-3'-phosphate
  modified_base 7: mod_base = OTHER; note = 2'-O-methyladenosine-3'-phosphate
  modified_base 8: mod_base = OTHER; note = 2'-O-methylguanosine-3'-phosphate
  modified_base 9: mod_base = OTHER; note = 2'-O-methyluridine-3'-phosphate
  modified_base 10: mod_base = OTHER; note = 2'-O-methyluridine-3'-phosphate
  modified_base 11: mod_base = OTHER; note = 2'-O-methylcytidine-3'-phosphate
  modified_base 12: mod_base = OTHER; note = 2'-O-methyluridine-3'-phosphate
  modified_base 13: mod_base = OTHER; note = 2'-O-methyluridine-3'-phosphate
  modified_base 14: mod_base = OTHER; note = 2'-deoxy-2'-fluorouridine-3'-phosphate
  modified_base 15: mod_base = OTHER; note = 2'-O-methylguanosine-3'-phosphate
  modified_base 16: mod_base = OTHER; note = 2'-deoxy-2'-fluorouridine-3'-phosphate
  modified_base 17: mod_base = OTHER; note = 2'-O-methyluridine-3'-phosphate
  modified_base 18: mod_base = OTHER; note = 2'-O-methylcytidine-3'-phosphate
  modified_base 19: mod_base = OTHER; note = 2'-O-methyladenosine-3'-phosphate
  modified_base 20: mod_base = OTHER; note = 2'-O-methyladenosine-3'-phosphate
  modified_base 21: mod_base = OTHER; note = 2'-O-methyluridine-3'-phosphorothioate
  modified_base 22: mod_base = OTHER; note = 2'-O-methylcytidine-3'-phosphorothioate
  modified_base 23: mod_base = OTHER; note = 2'-O-methyluridine
tttctaagttctttgttcaatct

SEQ ID NO: 13280 - RNA, 23 nt, synthetic construct
  source 1..23: mol_type = other RNA
  modified_base 1: mod_base = OTHER; note = 2'-O-methyluridine-3'-phosphorothioate 5'-(E)-Vinylphosphonate
  modified_base 2: mod_base = OTHER; note = 2'-deoxy-2'-fluorocytidine-3'-phosphorothioate
  modified_base 3: mod_base = OTHER; note = 2'-O-methyluridine-3'-phosphate
  modified_base 4: mod_base = OTHER; note = 2'-O-methyluridine-3'-phosphate
  modified_base 5: mod_base = OTHER; note = 2'-O-methylcytidine-3'-phosphate
  modified_base 6: mod_base = OTHER; note = 2'-deoxy-2'-fluorouridine-3'-phosphate
  modified_base 7: mod_base = OTHER; note = 2'-O-methyladenosine-3'-phosphate
  modified_base 8: mod_base = OTHER; note = 2'-O-methyladenosine-3'-phosphate
  modified_base 9: mod_base = OTHER; note = 2'-O-methylguanosine-3'-phosphate
  modified_base 10: mod_base = OTHER; note = 2'-O-methyluridine-3'-phosphate
  modified_base 11: mod_base = OTHER; note = 2'-O-methyluridine-3'-phosphate
  modified_base 12: mod_base = OTHER; note = 2'-O-methylcytidine-3'-phosphate
  modified_base 13: mod_base = OTHER; note = 2'-O-methyluridine-3'-phosphate
  modified_base 14: mod_base = OTHER; note = 2'-deoxy-2'-fluorouridine-3'-phosphate
  modified_base 15: mod_base = OTHER; note = 2'-O-methyluridine-3'-phosphate
  modified_base 16: mod_base = OTHER; note = 2'-deoxy-2'-fluoroguanosine-3'-phosphate
  modified_base 17: mod_base = OTHER; note = 2'-O-methyluridine-3'-phosphate
  modified_base 18: mod_base = OTHER; note = 2'-O-methyluridine-3'-phosphate
  modified_base 19: mod_base = OTHER; note = 2'-O-methylcytidine-3'-phosphate
  modified_base 20: mod_base = OTHER; note = 2'-O-methyladenosine-3'-phosphate
  modified_base 21: mod_base = OTHER; note = 2'-O-methyladenosine-3'-phosphorothioate
  modified_base 22: mod_base = OTHER; note = 2'-O-methyluridine-3'-phosphorothioate
  modified_base 23: mod_base = OTHER; note = 2'-O-methylcytidine
tcttctaagttctttgttcaatc

SEQ ID NO: 13281 - RNA, 23 nt, synthetic construct
  source 1..23: mol_type = other RNA
  modified_base 1: mod_base = OTHER; note = 2'-O-methyluridine-3'-phosphorothioate 5'-(E)-Vinylphosphonate
  modified_base 2: mod_base = OTHER; note = 2'-deoxy-2'-fluorouridine-3'-phosphorothioate
  modified_base 3: mod_base = OTHER; note = 2'-O-methyladenosine-3'-phosphate
  modified_base 4: mod_base = OTHER; note = 2'-O-methyladenosine-3'-phosphate
  modified_base 5: mod_base = OTHER; note = 2'-O-methyladenosine-3'-phosphate
  modified_base 6: mod_base = OTHER; note = 2'-deoxy-2'-fluorocytidine-3'-phosphate
  modified_base 7: mod_base = OTHER; note = 2'-O-methyladenosine-3'-phosphate
  modified_base 8: mod_base = OTHER; note = 2'-O-methyladenosine-3'-phosphate
  modified_base 9: mod_base = OTHER; note = 2'-O-methyluridine-3'-phosphate
  modified_base 10: mod_base = OTHER; note = 2'-O-methylcytidine-3'-phosphate
  modified_base 11: mod_base = OTHER; note = 2'-O-methyladenosine-3'-phosphate
  modified_base 12: mod_base = OTHER; note = 2'-O-methyladenosine-3'-phosphate
  modified_base 13: mod_base = OTHER; note = 2'-O-methyluridine-3'-phosphate
  modified_base 14: mod_base = OTHER; note = 2'-deoxy-2'-fluorouridine-3'-phosphate
  modified_base 15: mod_base = OTHER; note = 2'-O-methyluridine-3'-phosphate
  modified_base 16: mod_base = OTHER; note = 2'-deoxy-2'-fluorocytidine-3'-phosphate
  modified_base 17: mod_base = OTHER; note = 2'-O-methyluridine-3'-phosphate
  modified_base 18: mod_base = OTHER; note = 2'-O-methylcytidine-3'-phosphate
  modified_base 19: mod_base = OTHER; note = 2'-O-methyluridine-3'-phosphate
  modified_base 20: mod_base = OTHER; note = 2'-O-methyluridine-3'-phosphate
  modified_base 21: mod_base = OTHER; note = 2'-O-methylcytidine-3'-phosphorothioate
  modified_base 22: mod_base = OTHER; note = 2'-O-methyluridine-3'-phosphorothioate
  modified_base 23: mod_base = OTHER; note = 2'-O-methylcytidine
ttaaacaatcaatttctcttctc

SEQ ID NO: 13282 - RNA, 23 nt, synthetic construct
  source 1..23: mol_type = other RNA
  modified_base 1: mod_base = OTHER; note = 2'-O-methyluridine-3'-phosphorothioate 5'-(E)-Vinylphosphonate
  modified_base 2: mod_base = OTHER; note = 2'-deoxy-2'-fluoroguanosine-3'-phosphorothioate
  modified_base 3: mod_base = OTHER; note = 2'-O-methyluridine-3'-phosphate
  modified_base 4: mod_base = OTHER; note = 2'-O-methyluridine-3'-phosphate
  modified_base 5: mod_base = OTHER; note = 2'-O-methylguanosine-3'-phosphate
  modified_base 6: mod_base = OTHER; note = 2'-deoxy-2'-fluoroadenosine-3'-phosphate
  modified_base 7: mod_base = OTHER; note = 2'-O-methyladenosine-3'-phosphate
  modified_base 8: mod_base = OTHER; note = 2'-O-methyladenosine-3'-phosphate
  modified_base 9: mod_base = OTHER; note = 2'-O-methyladenosine-3'-phosphate
  modified_base 10: mod_base = OTHER; note = 2'-O-methyladenosine-3'-phosphate
  modified_base 11: mod_base = OTHER; note = 2'-O-methyluridine-3'-phosphate
  modified_base 12: mod_base = OTHER; note = 2'-O-methyluridine-3'-phosphate
  modified_base 13: mod_base = OTHER; note = 2'-O-methyladenosine-3'-phosphate
  modified_base 14: mod_base = OTHER; note = 2'-deoxy-2'-fluoroadenosine-3'-phosphate
  modified_base 15: mod_base = OTHER; note = 2'-O-methyladenosine-3'-phosphate
  modified_base 16: mod_base = OTHER; note = 2'-deoxy-2'-fluorocytidine-3'-phosphate
  modified_base 17: mod_base = OTHER; note = 2'-O-methylcytidine-3'-phosphate
  modified_base 18: mod_base = OTHER; note = 2'-O-methyladenosine-3'-phosphate
  modified_base 19: mod_base = OTHER; note = 2'-O-methyladenosine-3'-phosphate
  modified_base 20: mod_base = OTHER; note = 2'-O-methylcytidine-3'-phosphate
  modified_base 21: mod_base = OTHER; note = 2'-O-methyladenosine-3'-phosphorothioate
  modified_base 22: mod_base = OTHER; note = 2'-O-methyluridine-3'-phosphorothioate
  modified_base 23: mod_base = OTHER; note = 2'-O-methylguanosine
tgttgaaaaattaaaccaacatg

SEQ ID NO: 13283 - RNA, 23 nt, synthetic construct
  source 1..23: mol_type = other RNA
  modified_base 1: mod_base = OTHER; note = 2'-O-methyluridine-3'-phosphorothioate 5'-(E)-Vinylphosphonate
  modified_base 2: mod_base = OTHER; note = 2'-deoxy-2'-fluorocytidine-3'-phosphorothioate
  modified_base 3: mod_base = OTHER; note = 2'-O-methyladenosine-3'-phosphate
  modified_base 4: mod_base = OTHER; note = 2'-O-methyladenosine-3'-phosphate
  modified_base 5: mod_base = OTHER; note = 2'-O-methyluridine-3'-phosphate
  modified_base 6: mod_base = OTHER; note = 2'-deoxy-2'-fluorouridine-3'-phosphate
  modified_base 7: mod_base = OTHER; note = 2'-O-methyluridine-3'-phosphate
  modified_base 8: mod_base = OTHER; note = 2'-O-methylcytidine-3'-phosphate
  modified_base 9: mod_base = OTHER; note = 2'-O-methyluridine-3'-phosphate
  modified_base 10: mod_base = OTHER; note = 2'-O-methylcytidine-3'-phosphate
  modified_base 11: mod_base = OTHER; note = 2'-O-methyluridine-3'-phosphate
  modified_base 12: mod_base = OTHER; note = 2'-O-methyluridine-3'-phosphate
  modified_base 13: mod_base = OTHER; note = 2'-O-methylcytidine-3'-phosphate
  modified_base 14: mod_base = OTHER; note = 2'-deoxy-2'-fluorouridine-3'-phosphate
  modified_base 15: mod_base = OTHER; note = 2'-O-methylcytidine-3'-phosphate
  modified_base 16: mod_base = OTHER; note = 2'-deoxy-2'-fluorouridine-3'-phosphate
  modified_base 17: mod_base = OTHER; note = 2'-O-methylcytidine-3'-phosphate
  modified_base 18: mod_base = OTHER; note = 2'-O-methyladenosine-3'-phosphate
  modified_base 19: mod_base = OTHER; note = 2'-O-methylguanosine-3'-phosphate
  modified_base 20: mod_base = OTHER; note = 2'-O-methylguanosine-3'-phosphate
  modified_base 21: mod_base = OTHER; note = 2'-O-methyladenosine-3'-phosphorothioate
  modified_base 22: mod_base = OTHER; note = 2'-O-methyladenosine-3'-phosphorothioate
  modified_base 23: mod_base = OTHER; note = 2'-O-methyluridine
tcaatttctcttctctcaggaat

SEQ ID NO: 13284 - RNA, 23 nt, synthetic construct
  source 1..23: mol_type = other RNA
  modified_base 1: mod_base = OTHER; note = 2'-O-methyluridine-3'-phosphorothioate 5'-(E)-Vinylphosphonate
  modified_base 2: mod_base = OTHER; note = 2'-deoxy-2'-fluorouridine-3'-phosphorothioate
  modified_base 3: mod_base = OTHER; note = 2'-O-methylcytidine-3'-phosphate
  modified_base 4: mod_base = OTHER; note = 2'-O-methyladenosine-3'-phosphate
  modified_base 5: mod_base = OTHER; note = 2'-O-methyladenosine-3'-phosphate
  modified_base 6: mod_base = OTHER; note = 2'-deoxy-2'-fluorouridine-3'-phosphate
  modified_base 7: mod_base = OTHER; note = 2'-O-methyluridine-3'-phosphate
  modified_base 8: mod_base = OTHER; note = 2'-O-methyluridine-3'-phosphate
  modified_base 9: mod_base = OTHER; note = 2'-O-methylcytidine-3'-phosphate
  modified_base 10: mod_base = OTHER; note = 2'-O-methyluridine-3'-phosphate
  modified_base 11: mod_base = OTHER; note = 2'-O-methylcytidine-3'-phosphate
  modified_base 12: mod_base = OTHER; note = 2'-O-methyluridine-3'-phosphate
  modified_base 13: mod_base = OTHER; note = 2'-O-methyluridine-3'-phosphate
  modified_base 14: mod_base = OTHER; note = 2'-deoxy-2'-fluorocytidine-3'-phosphate
  modified_base 15: mod_base = OTHER; note = 2'-O-methyluridine-3'-phosphate
  modified_base 16: mod_base = OTHER; note = 2'-deoxy-2'-fluorocytidine-3'-phosphate
  modified_base 17: mod_base = OTHER; note = 2'-O-methyluridine-3'-phosphate
  modified_base 18: mod_base = OTHER; note = 2'-O-methylcytidine-3'-phosphate
  modified_base 19: mod_base = OTHER; note = 2'-O-methyladenosine-3'-phosphate
  modified_base 20: mod_base = OTHER; note = 2'-O-methylguanosine-3'-phosphate
  modified_base 21: mod_base = OTHER; note = 2'-O-methylguanosine-3'-phosphorothioate
  modified_base 22: mod_base = OTHER; note = 2'-O-methyladenosine-3'-phosphorothioate
  modified_base 23: mod_base = OTHER; note = 2'-O-methyladenosine
ttcaatttctcttctctcaggaa

SEQ ID NO: 13285 - RNA, 23 nt, synthetic construct
  source 1..23: mol_type = other RNA
  modified_base 1: mod_base = OTHER; note = 2'-O-methyluridine-3'-phosphorothioate 5'-(E)-Vinylphosphonate
  modified_base 2: mod_base = OTHER; note = 2'-deoxy-2'-fluoroadenosine-3'-phosphorothioate
  modified_base 3: mod_base = OTHER; note = 2'-O-methyluridine-3'-phosphate
  modified_base 4: mod_base = OTHER; note = 2'-O-methylcytidine-3'-phosphate
  modified_base 5: mod_base = OTHER; note = 2'-O-methyladenosine-3'-phosphate
  modified_base 6: mod_base = OTHER; note = 2'-deoxy-2'-fluoroadenosine-3'-phosphate
  modified_base 7: mod_base = OTHER; note = 2'-O-methyluridine-3'-phosphate
  modified_base 8: mod_base = OTHER; note = 2'-O-methyluridine-3'-phosphate
  modified_base 9: mod_base = OTHER; note = 2'-O-methyluridine-3'-phosphate
  modified_base 10: mod_base = OTHER; note = 2'-O-methylcytidine-3'-phosphate
  modified_base 11: mod_base = OTHER; note = 2'-O-methyluridine-3'-phosphate
  modified_base 12: mod_base = OTHER; note = 2'-O-methylcytidine-3'-phosphate
  modified_base 13: mod_base = OTHER; note = 2'-O-methyluridine-3'-phosphate
  modified_base 14: mod_base = OTHER; note = 2'-deoxy-2'-fluorouridine-3'-phosphate
  modified_base 15: mod_base = OTHER; note = 2'-O-methylcytidine-3'-phosphate
  modified_base 16: mod_base = OTHER; note = 2'-deoxy-2'-fluorouridine-3'-phosphate
  modified_base 17: mod_base = OTHER; note = 2'-O-methylcytidine-3'-phosphate
  modified_base 18: mod_base = OTHER; note = 2'-O-methyluridine-3'-phosphate
  modified_base 19: mod_base = OTHER; note = 2'-O-methylcytidine-3'-phosphate
  modified_base 20: mod_base = OTHER; note = 2'-O-methyladenosine-3'-phosphate
  modified_base 21: mod_base = OTHER; note = 2'-O-methylguanosine-3'-phosphorothioate
  modified_base 22: mod_base = OTHER; note = 2'-O-methylguanosine-3'-phosphorothioate
  modified_base 23: mod_base = OTHER; note = 2'-O-methyladenosine
tatcaatttctcttctctcagga

SEQ ID NO: 13286 - RNA, 23 nt, synthetic construct
  source 1..23: mol_type = other RNA
  modified_base 1: mod_base = OTHER; note = 2'-O-methyluridine-3'-phosphorothioate 5'-(E)-Vinylphosphonate
  modified_base 2: mod_base = OTHER; note = 2'-deoxy-2'-fluoroadenosine-3'-phosphorothioate
  modified_base 3: mod_base = OTHER; note = 2'-O-methyladenosine-3'-phosphate
  modified_base 4: mod_base = OTHER; note = 2'-O-methyluridine-3'-phosphate
  modified_base 5: mod_base = OTHER; note = 2'-O-methylcytidine-3'-phosphate
  modified_base 6: mod_base = OTHER; note = 2'-deoxy-2'-fluoroadenosine-3'-phosphate
  modified_base 7: mod_base = OTHER; note = 2'-O-methyladenosine-3'-phosphate
  modified_base 8: mod_base = OTHER; note = 2'-O-methyluridine-3'-phosphate
  modified_base 9: mod_base = OTHER; note = 2'-O-methyluridine-3'-phosphate
  modified_base 10: mod_base = OTHER; note = 2'-O-methyluridine-3'-phosphate
  modified_base 11: mod_base = OTHER; note = 2'-O-methylcytidine-3'-phosphate
  modified_base 12: mod_base = OTHER; note = 2'-O-methyluridine-3'-phosphate
  modified_base 13: mod_base = OTHER; note = 2'-O-methylcytidine-3'-phosphate
  modified_base 14: mod_base = OTHER; note = 2'-deoxy-2'-fluorouridine-3'-phosphate
  modified_base 15: mod_base = OTHER; note = 2'-O-methyluridine-3'-phosphate
  modified_base 16: mod_base = OTHER; note = 2'-deoxy-2'-fluorocytidine-3'-phosphate
  modified_base 17: mod_base = OTHER; note = 2'-O-methyluridine-3'-phosphate
  modified_base 18: mod_base = OTHER; note = 2'-O-methylcytidine-3'-phosphate
  modified_base 19: mod_base = OTHER; note = 2'-O-methyluridine-3'-phosphate
  modified_base 20: mod_base = OTHER; note = 2'-O-methylcytidine-3'-phosphate
  modified_base 21: mod_base = OTHER; note = 2'-O-methyladenosine-3'-phosphorothioate
  modified_base 22: mod_base = OTHER; note = 2'-O-methylguanosine-3'-phosphorothioate
  modified_base 23: mod_base = OTHER; note = 2'-O-methylguanosine
taatcaatttctcttctctcagg

SEQ ID NO: 13287 - RNA, 23 nt, synthetic construct
  source 1..23: mol_type = other RNA
  modified_base 1: mod_base = OTHER; note = 2'-O-methyluridine-3'-phosphorothioate 5'-(E)-Vinylphosphonate
  modified_base 2: mod_base = OTHER; note = 2'-deoxy-2'-fluorocytidine-3'-phosphorothioate
  modified_base 3: mod_base = OTHER; note = 2'-O-methyladenosine-3'-phosphate
  modified_base 4: mod_base = OTHER; note = 2'-O-methyladenosine-3'-phosphate
  modified_base 5: mod_base = OTHER; note = 2'-O-methyluridine-3'-phosphate
  modified_base 6: mod_base = OTHER; note = 2'-deoxy-2'-fluorocytidine-3'-phosphate
  modified_base 7: mod_base = OTHER; note = 2'-O-methyladenosine-3'-phosphate
  modified_base 8: mod_base = OTHER; note = 2'-O-methyladenosine-3'-phosphate
  modified_base 9: mod_base = OTHER; note = 2'-O-methyluridine-3'-phosphate
  modified_base 10: mod_base = OTHER; note = 2'-O-methyluridine-3'-phosphate
  modified_base 11: mod_base = OTHER; note = 2'-O-methyluridine-3'-phosphate
  modified_base 12: mod_base = OTHER; note = 2'-O-methylcytidine-3'-phosphate
  modified_base 13: mod_base = OTHER; note = 2'-O-methyluridine-3'-phosphate
  modified_base 14: mod_base = OTHER; note = 2'-deoxy-2'-fluorocytidine-3'-phosphate
  modified_base 15: mod_base = OTHER; note = 2'-O-methyluridine-3'-phosphate
  modified_base 16: mod_base = OTHER; note = 2'-deoxy-2'-fluorouridine-3'-phosphate
  modified_base 17: mod_base = OTHER; note = 2'-O-methylcytidine-3'-phosphate
  modified_base 18: mod_base = OTHER; note = 2'-O-methyluridine-3'-phosphate
  modified_base 19: mod_base = OTHER; note = 2'-O-methylcytidine-3'-phosphate
  modified_base 20: mod_base = OTHER; note = 2'-O-methyluridine-3'-phosphate
  modified_base 21: mod_base = OTHER; note = 2'-O-methylcytidine-3'-phosphorothioate
  modified_base 22: mod_base = OTHER; note = 2'-O-methyladenosine-3'-phosphorothioate
  modified_base 23: mod_base = OTHER; note = 2'-O-methylguanosine
tcaatcaatttctcttctctcag

SEQ ID NO: 13288 - RNA, 23 nt, synthetic construct
  source 1..23: mol_type = other RNA
  modified_base 1: mod_base = OTHER; note = 2'-O-methyluridine-3'-phosphorothioate 5'-(E)-Vinylphosphonate
  modified_base 2: mod_base = OTHER; note = 2'-deoxy-2'-fluoroadenosine-3'-phosphorothioate
  modified_base 3: mod_base = OTHER; note = 2'-O-methylcytidine-3'-phosphate
  modified_base 4: mod_base = OTHER; note = 2'-O-methyladenosine-3'-phosphate
  modified_base 5: mod_base = OTHER; note = 2'-O-methyladenosine-3'-phosphate
  modified_base 6: mod_base = OTHER; note = 2'-deoxy-2'-fluorouridine-3'-phosphate
  modified_base 7: mod_base = OTHER; note = 2'-O-methylcytidine-3'-phosphate
  modified_base 8: mod_base = OTHER; note = 2'-O-methyladenosine-3'-phosphate
  modified_base 9: mod_base = OTHER; note = 2'-O-methyladenosine-3'-phosphate
  modified_base 10: mod_base = OTHER; note = 2'-O-methyluridine-3'-phosphate
  modified_base 11: mod_base = OTHER; note = 2'-O-methyluridine-3'-phosphate
  modified_base 12: mod_base = OTHER; note = 2'-O-methyluridine-3'-phosphate
  modified_base 13: mod_base = OTHER; note = 2'-O-methylcytidine-3'-phosphate
  modified_base 14: mod_base = OTHER; note = 2'-deoxy-2'-fluorouridine-3'-phosphate
  modified_base 15: mod_base = OTHER; note = 2'-O-methylcytidine-3'-phosphate
  modified_base 16: mod_base = OTHER; note = 2'-deoxy-2'-fluorouridine-3'-phosphate
  modified_base 17: mod_base = OTHER; note = 2'-O-methyluridine-3'-phosphate
  modified_base 18: mod_base = OTHER; note = 2'-O-methylcytidine-3'-phosphate
  modified_base 19: mod_base = OTHER; note = 2'-O-methyluridine-3'-phosphate
  modified_base 20: mod_base = OTHER; note = 2'-O-methylcytidine-3'-phosphate
  modified_base 21: mod_base = OTHER; note = 2'-O-methyluridine-3'-phosphorothioate
  modified_base 22: mod_base = OTHER; note = 2'-O-methylcytidine-3'-phosphorothioate
  modified_base 23: mod_base = OTHER; note = 2'-O-methyladenosine
tacaatcaatttctcttctctca

SEQ ID NO: 13289 - RNA, 23 nt, synthetic construct
  source 1..23: mol_type = other RNA
  modified_base 1: mod_base = OTHER; note = 2'-O-methyluridine-3'-phosphorothioate 5'-(E)-Vinylphosphonate
  modified_base 2: mod_base = OTHER; note = 2'-deoxy-2'-fluoroadenosine-3'-phosphorothioate
  modified_base 3: mod_base = OTHER; note = 2'-O-methyladenosine-3'-phosphate
  modified_base 4: mod_base = OTHER; note = 2'-O-methylcytidine-3'-phosphate
  modified_base 5: mod_base = OTHER; note = 2'-O-methyladenosine-3'-phosphate
  modified_base 6: mod_base = OTHER; note = 2'-deoxy-2'-fluoroadenosine-3'-phosphate
  modified_base 7: mod_base = OTHER; note = 2'-O-methyluridine-3'-phosphate
  modified_base 8: mod_base = OTHER; note = 2'-O-methylcytidine-3'-phosphate
  modified_base 9: mod_base = OTHER; note = 2'-O-methyladenosine-3'-phosphate
  modified_base 10: mod_base = OTHER; note = 2'-O-methyladenosine-3'-phosphate
  modified_base 11: mod_base = OTHER; note = 2'-O-methyluridine-3'-phosphate
  modified_base 12: mod_base = OTHER; note = 2'-O-methyluridine-3'-phosphate
  modified_base 13: mod_base = OTHER; note = 2'-O-methyluridine-3'-phosphate
  modified_base 14: mod_base = OTHER; note = 2'-deoxy-2'-fluorocytidine-3'-phosphate
  modified_base 15: mod_base = OTHER; note = 2'-O-methyluridine-3'-phosphate
  modified_base 16: mod_base = OTHER; note = 2'-deoxy-2'-fluorocytidine-3'-phosphate
  modified_base 17: mod_base = OTHER; note = 2'-O-methyluridine-3'-phosphate
  modified_base 18: mod_base = OTHER; note = 2'-O-methyluridine-3'-phosphate
  modified_base 19: mod_base = OTHER; note = 2'-O-methylcytidine-3'-phosphate
  modified_base 20: mod_base = OTHER; note = 2'-O-methyluridine-3'-phosphate
  modified_base 21: mod_base = OTHER; note = 2'-O-methylcytidine-3'-phosphorothioate
  modified_base 22: mod_base = OTHER; note = 2'-O-methyluridine-3'-phosphorothioate
  modified_base 23: mod_base = OTHER; note = 2'-O-methylcytidine
taacaatcaatttctcttctctc

SEQ ID NO: 13290 - RNA, 23 nt, synthetic construct
  source 1..23: mol_type = other RNA
  modified_base 1: mod_base = OTHER; note = 2'-O-methyluridine-3'-phosphorothioate 5'-(E)-Vinylphosphonate
  modified_base 2: mod_base = OTHER; note = 2'-deoxy-2'-fluoroadenosine-3'-phosphorothioate
  modified_base 3: mod_base = OTHER; note = 2'-O-methyladenosine-3'-phosphate
  modified_base 4: mod_base = OTHER; note = 2'-O-methyladenosine-3'-phosphate
  modified_base 5: mod_base = OTHER; note = 2'-O-methylcytidine-3'-phosphate
  modified_base 6: mod_base = OTHER; note = 2'-deoxy-2'-fluoroadenosine-3'-phosphate
  modified_base 7: mod_base = OTHER; note = 2'-O-methyladenosine-3'-phosphate
  modified_base 8: mod_base = OTHER; note = 2'-O-methyluridine-3'-phosphate
  modified_base 9: mod_base = OTHER; note = 2'-O-methylcytidine-3'-phosphate
  modified_base 10: mod_base = OTHER; note = 2'-O-methyladenosine-3'-phosphate
  modified_base 11: mod_base = OTHER; note = 2'-O-methyladenosine-3'-phosphate
  modified_base 12: mod_base = OTHER; note = 2'-O-methyluridine-3'-phosphate
  modified_base 13: mod_base = OTHER; note = 2'-O-methyluridine-3'-phosphate
  modified_base 14: mod_base = OTHER; note = 2'-deoxy-2'-fluorouridine-3'-phosphate
  modified_base 15: mod_base = OTHER; note = 2'-O-methylcytidine-3'-phosphate
  modified_base 16: mod_base = OTHER; note = 2'-deoxy-2'-fluorouridine-3'-phosphate
  modified_base 17: mod_base = OTHER; note = 2'-O-methylcytidine-3'-phosphate
  modified_base 18: mod_base = OTHER; note = 2'-O-methyluridine-3'-phosphate
  modified_base 19: mod_base = OTHER; note = 2'-O-methyluridine-3'-phosphate
  modified_base 20: mod_base = OTHER; note = 2'-O-methylcytidine-3'-phosphate
  modified_base 21: mod_base = OTHER; note = 2'-O-methyluridine-3'-phosphorothioate
  modified_base 22: mod_base = OTHER; note = 2'-O-methylcytidine-3'-phosphorothioate
  modified_base 23: mod_base = OTHER; note = 2'-O-methyluridine
taaacaatcaatttctcttctct

SEQ ID NO: 13291 - RNA, 23 nt, synthetic construct
  source 1..23: mol_type = other RNA
  modified_base 1: mod_base = OTHER; note = 2'-O-methyluridine-3'-phosphorothioate 5'-(E)-Vinylphosphonate
  modified_base 2: mod_base = OTHER; note = 2'-deoxy-2'-fluoroguanosine-3'-phosphorothioate
  modified_base 3: mod_base = OTHER; note = 2'-O-methyladenosine-3'-phosphate
  modified_base 4: mod_base = OTHER; note = 2'-O-methyluridine-3'-phosphate
  modified_base 5: mod_base = OTHER; note = 2'-O-methyladenosine-3'-phosphate
  modified_base 6: mod_base = OTHER; note = 2'-deoxy-2'-fluoroadenosine-3'-phosphate
  modified_base 7: mod_base = OTHER; note = 2'-O-methyladenosine-3'-phosphate
  modified_base 8: mod_base = OTHER; note = 2'-O-methylcytidine-3'-phosphate
  modified_base 9: mod_base = OTHER; note = 2'-O-methyladenosine-3'-phosphate
  modified_base 10: mod_base = OTHER; note = 2'-O-methyladenosine-3'-phosphate
  modified_base 11: mod_base = OTHER; note = 2'-O-methyluridine-3'-phosphate
  modified_base 12: mod_base = OTHER; note = 2'-O-methylcytidine-3'-phosphate
  modified_base 13: mod_base = OTHER; note = 2'-O-methyladenosine-3'-phosphate
  modified_base 14: mod_base = OTHER; note = 2'-deoxy-2'-fluoroadenosine-3'-phosphate
  modified_base 15: mod_base = OTHER; note = 2'-O-methyluridine-3'-phosphate
  modified_base 16: mod_base = OTHER; note = 2'-deoxy-2'-fluorouridine-3'-phosphate
  modified_base 17: mod_base = OTHER; note = 2'-O-methyluridine-3'-phosphate
  modified_base 18: mod_base = OTHER; note = 2'-O-methylcytidine-3'-phosphate
  modified_base 19: mod_base = OTHER; note = 2'-O-methyluridine-3'-phosphate
  modified_base 20: mod_base = OTHER; note = 2'-O-methylcytidine-3'-phosphate
  modified_base 21: mod_base = OTHER; note = 2'-O-methyluridine-3'-phosphorothioate
  modified_base 22: mod_base = OTHER; note = 2'-O-methyluridine-3'-phosphorothioate
  modified_base 23: mod_base = OTHER; note = 2'-O-methylcytidine
tgataaacaatcaatttctcttc

SEQ ID NO: 13292 - RNA, 23 nt, synthetic construct
  source 1..23: mol_type = other RNA
  modified_base 1: mod_base = OTHER; note = 2'-O-methyluridine-3'-phosphorothioate 5'-(E)-Vinylphosphonate
  modified_base 2: mod_base = OTHER; note = 2'-deoxy-2'-fluoroguanosine-3'-phosphorothioate
  modified_base 3: mod_base = OTHER; note = 2'-O-methylguanosine-3'-phosphate
  modified_base 4: mod_base = OTHER; note = 2'-O-methyluridine-3'-phosphate
  modified_base 5: mod_base = OTHER; note = 2'-O-methyluridine-3'-phosphate
  modified_base 6: mod_base = OTHER; note = 2'-deoxy-2'-fluoroguanosine-3'-phosphate
  modified_base 7: mod_base = OTHER; note = 2'-O-methyladenosine-3'-phosphate
  modified_base 8: mod_base = OTHER; note = 2'-O-methyladenosine-3'-phosphate
  modified_base 9: mod_base = OTHER; note = 2'-O-methyladenosine-3'-phosphate
  modified_base 10: mod_base = OTHER; note = 2'-O-methyladenosine-3'-phosphate
  modified_base 11: mod_base = OTHER; note = 2'-O-methyladenosine-3'-phosphate
  modified_base 12: mod_base = OTHER; note = 2'-O-methyluridine-3'-phosphate
  modified_base 13: mod_base = OTHER; note = 2'-O-methyluridine-3'-phosphate
  modified_base 14: mod_base = OTHER; note = 2'-deoxy-2'-fluoroadenosine-3'-phosphate
  modified_base 15: mod_base = OTHER; note = 2'-O-methyladenosine-3'-phosphate
  modified_base 16: mod_base = OTHER; note = 2'-deoxy-2'-fluoroadenosine-3'-phosphate
  modified_base 17: mod_base = OTHER; note = 2'-O-methylcytidine-3'-phosphate
  modified_base 18: mod_base = OTHER; note = 2'-O-methylcytidine-3'-phosphate
  modified_base 19: mod_base = OTHER; note = 2'-O-methyladenosine-3'-phosphate
  modified_base 20: mod_base = OTHER; note = 2'-O-methyladenosine-3'-phosphate
  modified_base 21: mod_base = OTHER; note = 2'-O-methylcytidine-3'-phosphorothioate
  modified_base 22: mod_base = OTHER; note = 2'-O-methyladenosine-3'-phosphorothioate
  modified_base 23: mod_base = OTHER; note = 2'-O-methyluridine
tggttgaaaaattaaaccaacat

SEQ ID NO: 13293 - RNA, 23 nt, synthetic construct
  source 1..23: mol_type = other RNA
  modified_base 1: mod_base = OTHER; note = 2'-O-methyluridine-3'-phosphorothioate 5'-(E)-Vinylphosphonate
  modified_base 2: mod_base = OTHER; note = 2'-deoxy-2'-fluoroguanosine-3'-phosphorothioate
  modified_base 3: mod_base = OTHER; note = 2'-O-methylguanosine-3'-phosphate
  modified_base 4: mod_base = OTHER; note = 2'-O-methylguanosine-3'-phosphate
  modified_base 5: mod_base = OTHER; note = 2'-O-methyluridine-3'-phosphate
  modified_base 6: mod_base = OTHER; note = 2'-deoxy-2'-fluorouridine-3'-phosphate
  modified_base 7: mod_base = OTHER; note = 2'-O-methylguanosine-3'-phosphate
  modified_base 8: mod_base = OTHER; note = 2'-O-methyladenosine-3'-phosphate
  modified_base 9: mod_base = OTHER; note = 2'-O-methyladenosine-3'-phosphate
  modified_base 10: mod_base = OTHER; note = 2'-O-methyladenosine-3'-phosphate
  modified_base 11: mod_base = OTHER; note = 2'-O-methyladenosine-3'-phosphate
  modified_base 12: mod_base = OTHER; note = 2'-O-methyladenosine-3'-phosphate
  modified_base 13: mod_base = OTHER; note = 2'-O-methyluridine-3'-phosphate
  modified_base 14: mod_base = OTHER; note = 2'-deoxy-2'-fluorouridine-3'-phosphate
  modified_base 15: mod_base = OTHER; note = 2'-O-methyladenosine-3'-phosphate
  modified_base 16: mod_base = OTHER; note = 2'-deoxy-2'-fluoroadenosine-3'-phosphate
  modified_base 17: mod_base = OTHER; note = 2'-O-methyladenosine-3'-phosphate
  modified_base 18: mod_base = OTHER; note = 2'-O-methylcytidine-3'-phosphate
  modified_base 19: mod_base = OTHER; note = 2'-O-methylcytidine-3'-phosphate
  modified_base 20: mod_base = OTHER; note = 2'-O-methyladenosine-3'-phosphate
  modified_base 21: mod_base = OTHER; note = 2'-O-methyladenosine-3'-phosphorothioate
  modified_base 22: mod_base = OTHER; note = 2'-O-methylcytidine-3'-phosphorothioate
  modified_base 23: mod_base = OTHER; note = 2'-O-methyladenosine
tgggttgaaaaattaaaccaaca

SEQ ID NO: 13294 - RNA, 23 nt, synthetic construct
  source 1..23: mol_type = other RNA
  modified_base 1: mod_base = OTHER; note = 2'-O-methyluridine-3'-phosphorothioate 5'-(E)-Vinylphosphonate
  modified_base 2: mod_base = OTHER; note = 2'-deoxy-2'-fluorouridine-3'-phosphorothioate
  modified_base 3: mod_base = OTHER; note = 2'-O-methylguanosine-3'-phosphate
  modified_base 4: mod_base = OTHER; note = 2'-O-methylguanosine-3'-phosphate
  modified_base 5: mod_base = OTHER; note = 2'-O-methylguanosine-3'-phosphate
  modified_base 6: mod_base = OTHER; note = 2'-deoxy-2'-fluorouridine-3'-phosphate
  modified_base 7: mod_base = OTHER; note = 2'-O-methyluridine-3'-phosphate
  modified_base 8: mod_base = OTHER; note = 2'-O-methylguanosine-3'-phosphate
  modified_base 9: mod_base = OTHER; note = 2'-O-methyladenosine-3'-phosphate
  modified_base 10: mod_base = OTHER; note = 2'-O-methyladenosine-3'-phosphate
  modified_base 11: mod_base = OTHER; note = 2'-O-methyladenosine-3'-phosphate
  modified_base 12: mod_base = OTHER; note = 2'-O-methyladenosine-3'-phosphate
  modified_base 13: mod_base = OTHER; note = 2'-O-methyladenosine-3'-phosphate
  modified_base 14: mod_base = OTHER; note = 2'-deoxy-2'-fluorouridine-3'-phosphate
  modified_base 15: mod_base = OTHER; note = 2'-O-methyluridine-3'-phosphate
  modified_base 16: mod_base = OTHER; note = 2'-deoxy-2'-fluoroadenosine-3'-phosphate
  modified_base 17: mod_base = OTHER; note = 2'-O-methyladenosine-3'-phosphate
  modified_base 18: mod_base = OTHER; note = 2'-O-methyladenosine-3'-phosphate
  modified_base 19: mod_base = OTHER; note = 2'-O-methylcytidine-3'-phosphate
  modified_base 20: mod_base = OTHER; note = 2'-O-methylcytidine-3'-phosphate
  modified_base 21: mod_base = OTHER; note = 2'-O-methyladenosine-3'-phosphorothioate
  modified_base 22: mod_base = OTHER; note = 2'-O-methyladenosine-3'-phosphorothioate
  modified_base 23: mod_base = OTHER; note = 2'-O-methylcytidine
ttgggttgaaaaattaaaccaac

SEQ ID NO: 13295 - RNA, 23 nt, synthetic construct
  source 1..23: mol_type = other RNA
  modified_base 1: mod_base = OTHER; note = 2'-O-methyluridine-3'-phosphorothioate 5'-(E)-Vinylphosphonate
  modified_base 2: mod_base = OTHER; note = 2'-deoxy-2'-fluoroadenosine-3'-phosphorothioate
  modified_base 3: mod_base = OTHER; note = 2'-O-methyladenosine-3'-phosphate
  modified_base 4: mod_base = OTHER; note = 2'-O-methyluridine-3'-phosphate
  modified_base 5: mod_base = OTHER; note = 2'-O-methylguanosine-3'-phosphate
  modified_base 6: mod_base = OTHER; note = 2'-deoxy-2'-fluoroadenosine-3'-phosphate
  modified_base 7: mod_base = OTHER; note = 2'-O-methyladenosine-3'-phosphate
  modified_base 8: mod_base = OTHER; note = 2'-O-methyladenosine-3'-phosphate
  modified_base 9: mod_base = OTHER; note = 2'-O-methyladenosine-3'-phosphate
  modified_base 10: mod_base = OTHER; note = 2'-O-methylcytidine-3'-phosphate
  modified_base 11: mod_base = OTHER; note = 2'-O-methyluridine-3'-phosphate
  modified_base 12: mod_base = OTHER; note = 2'-O-methylguanosine-3'-phosphate
  modified_base 13: mod_base = OTHER; note = 2'-O-methyluridine-3'-phosphate
  modified_base 14: mod_base = OTHER; note = 2'-deoxy-2'-fluoroadenosine-3'-phosphate
  modified_base 15: mod_base = OTHER; note = 2'-O-methyluridine-3'-phosphate
  modified_base 16: mod_base = OTHER; note = 2'-deoxy-2'-fluoroguanosine-3'-phosphate
  modified_base 17: mod_base = OTHER; note = 2'-O-methylguanosine-3'-phosphate
  modified_base 18: mod_base = OTHER; note = 2'-O-methyladenosine-3'-phosphate
  modified_base 19: mod_base = OTHER; note = 2'-O-methylcytidine-3'-phosphate
  modified_base 20: mod_base = OTHER; note = 2'-O-methylguanosine-3'-phosphate
  modified_base 21: mod_base = OTHER; note = 2'-O-methyladenosine-3'-phosphorothioate
  modified_base 22: mod_base = OTHER; note = 2'-O-methyluridine-3'-phosphorothioate
  modified_base 23: mod_base = OTHER; note = 2'-O-methyladenosine
taatgaaaactgtatggacgata

SEQ ID NO: 13296 - RNA, 23 nt, synthetic construct
  source 1..23: mol_type = other RNA
  modified_base 1: mod_base = OTHER; note = 2'-O-methyluridine-3'-phosphorothioate 5'-(E)-Vinylphosphonate
  modified_base 2: mod_base = OTHER; note = 2'-deoxy-2'-fluoroguanosine-3'-phosphorothioate
  modified_base 3: mod_base = OTHER; note = 2'-O-methyladenosine-3'-phosphate
  modified_base 4: mod_base = OTHER; note = 2'-O-methyladenosine-3'-phosphate
  modified_base 5: mod_base = OTHER; note = 2'-O-methyluridine-3'-phosphate
  modified_base 6: mod_base = OTHER; note = 2'-deoxy-2'-fluoroguanosine-3'-phosphate
  modified_base 7: mod_base = OTHER; note = 2'-O-methyladenosine-3'-phosphate
  modified_base 8: mod_base = OTHER; note = 2'-O-methyladenosine-3'-phosphate
  modified_base 9: mod_base = OTHER; note = 2'-O-methyladenosine-3'-phosphate
  modified_base 10: mod_base = OTHER; note = 2'-O-methyladenosine-3'-phosphate
  modified_base 11: mod_base = OTHER; note = 2'-O-methylcytidine-3'-phosphate
  modified_base 12: mod_base = OTHER; note = 2'-O-methyluridine-3'-phosphate
  modified_base 13: mod_base = OTHER; note = 2'-O-methylguanosine-3'-phosphate
  modified_base 14: mod_base = OTHER; note = 2'-deoxy-2'-fluorouridine-3'-phosphate
  modified_base 15: mod_base = OTHER; note = 2'-O-methyladenosine-3'-phosphate
  modified_base 16: mod_base = OTHER; note = 2'-deoxy-2'-fluorouridine-3'-phosphate
  modified_base 17: mod_base = OTHER; note = 2'-O-methylguanosine-3'-phosphate
  modified_base 18: mod_base = OTHER; note = 2'-O-methylguanosine-3'-phosphate
  modified_base 19: mod_base = OTHER; note = 2'-O-methyladenosine-3'-phosphate
  modified_base 20: mod_base = OTHER; note = 2'-O-methylcytidine-3'-phosphate
  modified_base 21: mod_base = OTHER; note = 2'-O-methylguanosine-3'-phosphorothioate
  modified_base 22: mod_base = OTHER; note = 2'-O-methyladenosine-3'-phosphorothioate
  modified_base 23: mod_base = OTHER; note = 2'-O-methyluridine
tgaatgaaaactgtatggacgat

SEQ ID NO: 13297 - RNA, 23 nt, synthetic construct
  source 1..23: mol_type = other RNA
  modified_base 1: mod_base = OTHER; note = 2'-O-methyluridine-3'-phosphorothioate 5'-(E)-Vinylphosphonate
  modified_base 2: mod_base = OTHER; note = 2'-deoxy-2'-fluoroadenosine-3'-phosphorothioate
  modified_base 3: mod_base = OTHER; note = 2'-O-methylguanosine-3'-phosphate
  modified_base 4: mod_base = OTHER; note = 2'-O-methyladenosine-3'-phosphate
  modified_base 5: mod_base = OTHER; note = 2'-O-methyladenosine-3'-phosphate
  modified_base 6: mod_base = OTHER; note = 2'-deoxy-2'-fluorouridine-3'-phosphate
  modified_base 7: mod_base = OTHER; note = 2'-O-methylguanosine-3'-phosphate
  modified_base 8: mod_base = OTHER; note = 2'-O-methyladenosine-3'-phosphate
  modified_base 9: mod_base = OTHER; note = 2'-O-methyladenosine-3'-phosphate
  modified_base 10: mod_base = OTHER; note = 2'-O-methyladenosine-3'-phosphate
  modified_base 11: mod_base = OTHER; note = 2'-O-methyladenosine-3'-phosphate
  modified_base 12: mod_base = OTHER; note = 2'-O-methylcytidine-3'-phosphate
  modified_base 13: mod_base = OTHER; note = 2'-O-methyluridine-3'-phosphate
  modified_base 14: mod_base = OTHER; note = 2'-deoxy-2'-fluoroguanosine-3'-phosphate
  modified_base 15: mod_base = OTHER; note = 2'-O-methyluridine-3'-phosphate
  modified_base 16: mod_base = OTHER; note = 2'-deoxy-2'-fluoroadenosine-3'-phosphate
  modified_base 17: mod_base = OTHER; note = 2'-O-methyluridine-3'-phosphate
  modified_base 18: mod_base = OTHER; note = 2'-O-methylguanosine-3'-phosphate
  modified_base 19: mod_base = OTHER; note = 2'-O-methylguanosine-3'-phosphate
  modified_base 20: mod_base = OTHER; note = 2'-O-methyladenosine-3'-phosphate
  modified_base 21: mod_base = OTHER; note = 2'-O-methylcytidine-3'-phosphorothioate
  modified_base 22: mod_base = OTHER; note = 2'-O-methylguanosine-3'-phosphorothioate
  modified_base 23: mod_base = OTHER; note = 2'-O-methyladenosine
tagaatgaaaactgtatggacga

SEQ ID NO: 13298 - RNA, 23 nt, synthetic construct
  source 1..23: mol_type = other RNA
  modified_base 1: mod_base = OTHER; note = 2'-O-methyluridine-3'-phosphorothioate 5'-(E)-Vinylphosphonate
  modified_base 2: mod_base = OTHER; note = 2'-deoxy-2'-fluorouridine-3'-phosphorothioate
  modified_base 3: mod_base = OTHER; note = 2'-O-methyladenosine-3'-phosphate
  modified_base 4: mod_base = OTHER; note = 2'-O-methylguanosine-3'-phosphate
  modified_base 5: mod_base = OTHER; note = 2'-O-methyladenosine-3'-phosphate
  modified_base 6: mod_base = OTHER; note = 2'-deoxy-2'-fluoroadenosine-3'-phosphate
  modified_base 7: mod_base = OTHER; note = 2'-O-methyluridine-3'-phosphate
  modified_base 8: mod_base = OTHER; note = 2'-O-methylguanosine-3'-phosphate
  modified_base 9: mod_base = OTHER; note = 2'-O-methyladenosine-3'-phosphate
  modified_base 10: mod_base = OTHER; note = 2'-O-methyladenosine-3'-phosphate
  modified_base 11: mod_base = OTHER; note = 2'-O-methyladenosine-3'-phosphate
  modified_base 12: mod_base = OTHER; note = 2'-O-methyladenosine-3'-phosphate
  modified_base 13: mod_base = OTHER; note = 2'-O-methylcytidine-3'-phosphate
  modified_base 14: mod_base = OTHER; note = 2'-deoxy-2'-fluorouridine-3'-phosphate
  modified_base 15: mod_base = OTHER; note = 2'-O-methylguanosine-3'-phosphate
  modified_base 16: mod_base = OTHER; note = 2'-deoxy-2'-fluorouridine-3'-phosphate
  modified_base 17: mod_base = OTHER; note = 2'-O-methyladenosine-3'-phosphate
  modified_base 18: mod_base = OTHER; note = 2'-O-methyluridine-3'-phosphate
  modified_base 19: mod_base = OTHER; note = 2'-O-methylguanosine-3'-phosphate
  modified_base 20: mod_base = OTHER; note = 2'-O-methylguanosine-3'-phosphate
  modified_base 21: mod_base = OTHER; note = 2'-O-methyladenosine-3'-phosphorothioate
  modified_base 22: mod_base = OTHER; note = 2'-O-methylcytidine-3'-phosphorothioate
  modified_base 23: mod_base = OTHER; note = 2'-O-methylguanosine
ttagaatgaaaactgtatggacg

SEQ ID NO: 13299 - RNA, 23 nt, synthetic construct
  source 1..23: mol_type = other RNA
  modified_base 1: mod_base = OTHER; note = 2'-O-methyluridine-3'-phosphorothioate 5'-(E)-Vinylphosphonate
  modified_base 2: mod_base = OTHER; note = 2'-deoxy-2'-fluoroadenosine-3'-phosphorothioate
  modified_base 3: mod_base = OTHER; note = 2'-O-methyluridine-3'-phosphate
  modified_base 4: mod_base = OTHER; note = 2'-O-methyladenosine-3'-phosphate
  modified_base 5: mod_base = OTHER; note = 2'-O-methylguanosine-3'-phosphate
  modified_base 6: mod_base = OTHER; note = 2'-deoxy-2'-fluoroadenosine-3'-phosphate
  modified_base 7: mod_base = OTHER; note = 2'-O-methyladenosine-3'-phosphate
  modified_base 8: mod_base = OTHER; note = 2'-O-methyluridine-3'-phosphate
  modified_base 9: mod_base = OTHER; note = 2'-O-methylguanosine-3'-phosphate
  modified_base 10: mod_base = OTHER; note = 2'-O-methyladenosine-3'-phosphate
  modified_base 11: mod_base = OTHER; note = 2'-O-methyladenosine-3'-phosphate
  modified_base 12: mod_base = OTHER; note = 2'-O-methyladenosine-3'-phosphate
  modified_base 13: mod_base = OTHER; note = 2'-O-methyladenosine-3'-phosphate
  modified_base 14: mod_base = OTHER; note = 2'-deoxy-2'-fluorocytidine-3'-phosphate
  modified_base 15: mod_base = OTHER; note = 2'-O-methyluridine-3'-phosphate
  modified_base 16: mod_base = OTHER; note = 2'-deoxy-2'-fluoroguanosine-3'-phosphate
  modified_base 17: mod_base = OTHER; note = 2'-O-methyluridine-3'-phosphate
  modified_base 18: mod_base = OTHER; note = 2'-O-methyladenosine-3'-phosphate
  modified_base 19: mod_base = OTHER; note = 2'-O-methyluridine-3'-phosphate
  modified_base 20: mod_base = OTHER; note = 2'-O-methylguanosine-3'-phosphate
  modified_base 21: mod_base = OTHER; note = 2'-O-methylguanosine-3'-phosphorothioate
  modified_base 22: mod_base = OTHER; note = 2'-O-methyladenosine-3'-phosphorothioate
  modified_base 23: mod_base = OTHER; note = 2'-O-methylcytidine
tatagaatgaaaactgtatggac

SEQ ID NO: 13300 - RNA, 23 nt, synthetic construct
  source 1..23: mol_type = other RNA
  modified_base 1: mod_base = OTHER; note = 2'-O-methyluridine-3'-phosphorothioate 5'-(E)-Vinylphosphonate
  modified_base 2: mod_base = OTHER; note = 2'-deoxy-2'-fluorocytidine-3'-phosphorothioate
  modified_base 3: mod_base = OTHER; note = 2'-O-methyladenosine-3'-phosphate
  modified_base 4: mod_base = OTHER; note = 2'-O-methyluridine-3'-phosphate
  modified_base 5: mod_base = OTHER; note = 2'-O-methyladenosine-3'-phosphate
  modified_base 6: mod_base = OTHER; note = 2'-deoxy-2'-fluoroguanosine-3'-phosphate
  modified_base 7: mod_base = OTHER; note = 2'-O-methyladenosine-3'-phosphate
  modified_base 8: mod_base = OTHER; note = 2'-O-methyladenosine-3'-phosphate
  modified_base 9: mod_base = OTHER; note = 2'-O-methyluridine-3'-phosphate
  modified_base 10: mod_base = OTHER; note = 2'-O-methylguanosine-3'-phosphate
  modified_base 11: mod_base = OTHER; note = 2'-O-methyladenosine-3'-phosphate
  modified_base 12: mod_base = OTHER; note = 2'-O-methyladenosine-3'-phosphate
  modified_base 13: mod_base = OTHER; note = 2'-O-methyladenosine-3'-phosphate
  modified_base 14: mod_base = OTHER; note = 2'-deoxy-2'-fluoroadenosine-3'-phosphate
  modified_base 15: mod_base = OTHER; note = 2'-O-methylcytidine-3'-phosphate
  modified_base 16: mod_base = OTHER; note = 2'-deoxy-2'-fluorouridine-3'-phosphate
  modified_base 17: mod_base = OTHER; note = 2'-O-methylguanosine-3'-phosphate
  modified_base 18: mod_base = OTHER; note = 2'-O-methyluridine-3'-phosphate
  modified_base 19: mod_base = OTHER; note = 2'-O-methyladenosine-3'-phosphate
  modified_base 20: mod_base = OTHER; note = 2'-O-methyluridine-3'-phosphate
  modified_base 21: mod_base = OTHER; note = 2'-O-methylguanosine-3'-phosphorothioate
  modified_base 22: mod_base = OTHER; note = 2'-O-methylguanosine-3'-phosphorothioate
  modified_base 23: mod_base = OTHER; note = 2'-O-methyladenosine
tcatagaatgaaaactgtatgga

SEQ ID NO: 13301 - RNA, 23 nt, synthetic construct
  source 1..23: mol_type = other RNA
  modified_base 1: mod_base = OTHER; note = 2'-O-methyluridine-3'-phosphorothioate 5'-(E)-Vinylphosphonate
  modified_base 2: mod_base = OTHER; note = 2'-deoxy-2'-fluoroguanosine-3'-phosphorothioate
  modified_base 3: mod_base = OTHER; note = 2'-O-methylcytidine-3'-phosphate
  modified_base 4: mod_base = OTHER; note = 2'-O-methyladenosine-3'-phosphate
  modified_base 5: mod_base = OTHER; note = 2'-O-methyluridine-3'-phosphate
  modified_base 6: mod_base = OTHER; note = 2'-deoxy-2'-fluoroadenosine-3'-phosphate
  modified_base 7: mod_base = OTHER; note = 2'-O-methylguanosine-3'-phosphate
  modified_base 8: mod_base = OTHER; note = 2'-O-methyladenosine-3'-phosphate
  modified_base 9: mod_base = OTHER; note = 2'-O-methyladenosine-3'-phosphate
  modified_base 10: mod_base = OTHER; note = 2'-O-methyluridine-3'-phosphate
  modified_base 11: mod_base = OTHER; note = 2'-O-methylguanosine-3'-phosphate
  modified_base 12: mod_base = OTHER; note = 2'-O-methyladenosine-3'-phosphate
  modified_base 13: mod_base = OTHER; note = 2'-O-methyladenosine-3'-phosphate
  modified_base 14: mod_base = OTHER; note = 2'-deoxy-2'-fluoroadenosine-3'-phosphate
  modified_base 15: mod_base = OTHER; note = 2'-O-methyladenosine-3'-phosphate
  modified_base 16: mod_base = OTHER; note = 2'-deoxy-2'-fluorocytidine-3'-phosphate
  modified_base 17: mod_base = OTHER; note = 2'-O-methyluridine-3'-phosphate
  modified_base 18: mod_base = OTHER; note = 2'-O-methylguanosine-3'-phosphate
  modified_base 19: mod_base = OTHER; note = 2'-O-methyluridine-3'-phosphate
  modified_base 20: mod_base = OTHER; note = 2'-O-methyladenosine-3'-phosphate
  modified_base 21: mod_base = OTHER; note = 2'-O-methyluridine-3'-phosphorothioate
  modified_base 22: mod_base = OTHER; note = 2'-O-methylguanosine-3'-phosphorothioate
  modified_base 23: mod_base = OTHER; note = 2'-O-methylguanosine
tgcatagaatgaaaactgtatgg

SEQ ID NO: 13302 - RNA, 23 nt, synthetic construct
  source 1..23: mol_type = other RNA
  modified_base 1: mod_base = OTHER; note = 2'-O-methyluridine-3'-phosphorothioate 5'-(E)-Vinylphosphonate
  modified_base 2: mod_base = OTHER; note = 2'-deoxy-2'-fluorouridine-3'-phosphorothioate
  modified_base 3: mod_base = OTHER; note = 2'-O-methylguanosine-3'-phosphate
  modified_base 4: mod_base = OTHER; note = 2'-O-methylcytidine-3'-phosphate
  modified_base 5: mod_base = OTHER; note = 2'-O-methyladenosine-3'-phosphate
  modified_base 6: mod_base = OTHER; note = 2'-deoxy-2'-fluorouridine-3'-phosphate
  modified_base 7: mod_base = OTHER; note = 2'-O-methyladenosine-3'-phosphate
  modified_base 8: mod_base = OTHER; note = 2'-O-methylguanosine-3'-phosphate
  modified_base 9: mod_base = OTHER; note = 2'-O-methyladenosine-3'-phosphate
  modified_base 10: mod_base = OTHER; note = 2'-O-methyladenosine-3'-phosphate
  modified_base 11: mod_base = OTHER; note = 2'-O-methyluridine-3'-phosphate
  modified_base 12: mod_base = OTHER; note = 2'-O-methylguanosine-3'-phosphate
  modified_base 13: mod_base = OTHER; note = 2'-O-methyladenosine-3'-phosphate
  modified_base 14: mod_base = OTHER; note = 2'-deoxy-2'-fluoroadenosine-3'-phosphate
  modified_base 15: mod_base = OTHER; note = 2'-O-methyladenosine-3'-phosphate
  modified_base 16: mod_base = OTHER; note = 2'-deoxy-2'-fluoroadenosine-3'-phosphate
  modified_base 17: mod_base = OTHER; note = 2'-O-methylcytidine-3'-phosphate
  modified_base 18: mod_base = OTHER; note = 2'-O-methyluridine-3'-phosphate
  modified_base 19: mod_base = OTHER; note = 2'-O-methylguanosine-3'-phosphate
  modified_base 20: mod_base = OTHER; note = 2'-O-methyluridine-3'-phosphate
  modified_base 21: mod_base = OTHER; note = 2'-O-methyladenosine-3'-phosphorothioate
  modified_base 22: mod_base = OTHER; note = 2'-O-methyluridine-3'-phosphorothioate
  modified_base 23: mod_base = OTHER; note = 2'-O-methylguanosine
ttgcatagaatgaaaactgtatg

SEQ ID NO: 13303 - RNA, 23 nt, synthetic construct
  source 1..23: mol_type = other RNA
  modified_base 1: mod_base = OTHER; note = 2'-O-methyluridine-3'-phosphorothioate 5'-(E)-Vinylphosphonate
  modified_base 2: mod_base = OTHER; note = 2'-deoxy-2'-fluoroadenosine-3'-phosphorothioate
  modified_base 3: mod_base = OTHER; note = 2'-O-methyluridine-3'-phosphate
  modified_base 4: mod_base = OTHER; note = 2'-O-methylguanosine-3'-phosphate
  modified_base 5: mod_base = OTHER; note = 2'-O-methylcytidine-3'-phosphate
  modified_base 6: mod_base = OTHER; note = 2'-deoxy-2'-fluoroadenosine-3'-phosphate
  modified_base 7: mod_base = OTHER; note = 2'-O-methyluridine-3'-phosphate
  modified_base 8: mod_base = OTHER; note = 2'-O-methyladenosine-3'-phosphate
  modified_base 9: mod_base = OTHER; note = 2'-O-methylguanosine-3'-phosphate
  modified_base 10: mod_base = OTHER; note = 2'-O-methyladenosine-3'-phosphate
  modified_base 11: mod_base = OTHER; note = 2'-O-methyladenosine-3'-phosphate
  modified_base 12: mod_base = OTHER; note = 2'-O-methyluridine-3'-phosphate
  modified_base 13: mod_base = OTHER; note = 2'-O-methylguanosine-3'-phosphate
  modified_base 14: mod_base = OTHER; note = 2'-deoxy-2'-fluoroadenosine-3'-phosphate
  modified_base 15: mod_base = OTHER; note = 2'-O-methyladenosine-3'-phosphate
  modified_base 16: mod_base = OTHER; note = 2'-deoxy-2'-fluoroadenosine-3'-phosphate
  modified_base 17: mod_base = OTHER; note = 2'-O-methyladenosine-3'-phosphate
  modified_base 18: mod_base = OTHER; note = 2'-O-methylcytidine-3'-phosphate
  modified_base 19: mod_base = OTHER; note = 2'-O-methyluridine-3'-phosphate
  modified_base 20: mod_base = OTHER; note = 2'-O-methylguanosine-3'-phosphate
  modified_base 21: mod_base = OTHER; note = 2'-O-methyluridine-3'-phosphorothioate
  modified_base 22: mod_base = OTHER; note = 2'-O-methyladenosine-3'-phosphorothioate
  modified_base 23: mod_base = OTHER; note = 2'-O-methyluridine
tatgcatagaatgaaaactgtat

SEQ ID NO: 13304 - RNA, 23 nt, synthetic construct
  source 1..23: mol_type = other RNA
  modified_base 1: mod_base = OTHER; note = 2'-O-methyluridine-3'-phosphorothioate 5'-(E)-Vinylphosphonate
  modified_base 2: mod_base = OTHER; note = 2'-deoxy-2'-fluorocytidine-3'-phosphorothioate
  modified_base 3: mod_base = OTHER; note = 2'-O-methyladenosine-3'-phosphate
  modified_base 4: mod_base = OTHER; note = 2'-O-methyluridine-3'-phosphate
  modified_base 5: mod_base = OTHER; note = 2'-O-methylguanosine-3'-phosphate
  modified_base 6: mod_base = OTHER; note = 2'-deoxy-2'-fluorocytidine-3'-phosphate
  modified_base 7: mod_base = OTHER; note = 2'-O-methyladenosine-3'-phosphate
  modified_base 8: mod_base = OTHER; note = 2'-O-methyluridine-3'-phosphate
  modified_base 9: mod_base = OTHER; note = 2'-O-methyladenosine-3'-phosphate
  modified_base 10: mod_base = OTHER; note = 2'-O-methylguanosine-3'-phosphate
  modified_base 11: mod_base = OTHER; note = 2'-O-methyladenosine-3'-phosphate
  modified_base 12: mod_base = OTHER; note = 2'-O-methyladenosine-3'-phosphate
  modified_base 13: mod_base = OTHER; note = 2'-O-methyluridine-3'-phosphate
  modified_base 14: mod_base = OTHER; note = 2'-deoxy-2'-fluoroguanosine-3'-phosphate
  modified_base 15: mod_base = OTHER; note = 2'-O-methyladenosine-3'-phosphate
  modified_base 16: mod_base = OTHER; note = 2'-deoxy-2'-fluoroadenosine-3'-phosphate
  modified_base 17: mod_base = OTHER; note = 2'-O-methyladenosine-3'-phosphate
  modified_base 18: mod_base = OTHER; note = 2'-O-methyladenosine-3'-phosphate
  modified_base 19: mod_base = OTHER; note = 2'-O-methylcytidine-3'-phosphate
  modified_base 20: mod_base = OTHER; note = 2'-O-methyluridine-3'-phosphate
  modified_base 21: mod_base = OTHER; note = 2'-O-methylguanosine-3'-phosphorothioate
  modified_base 22: mod_base = OTHER; note = 2'-O-methyluridine-3'-phosphorothioate
  modified_base 23: mod_base = OTHER; note = 2'-O-methyladenosine
tcatgcatagaatgaaaactgta

SEQ ID NO: 13305 - RNA, 23 nt, synthetic construct
  source 1..23: mol_type = other RNA
  modified_base 1: mod_base = OTHER; note = 2'-O-methyluridine-3'-phosphorothioate 5'-(E)-Vinylphosphonate
  modified_base 2: mod_base = OTHER; note = 2'-deoxy-2'-fluorocytidine-3'-phosphorothioate
  modified_base 3: mod_base = OTHER; note = 2'-O-methylcytidine-3'-phosphate
  modified_base 4: mod_base = OTHER; note = 2'-O-methyladenosine-3'-phosphate
  modified_base 5: mod_base = OTHER; note = 2'-O-methyluridine-3'-phosphate
  modified_base 6: mod_base = OTHER; note = 2'-deoxy-2'-fluoroguanosine-3'-phosphate
  modified_base 7: mod_base = OTHER; note = 2'-O-methylcytidine-3'-phosphate
  modified_base 8: mod_base = OTHER; note = 2'-O-methyladenosine-3'-phosphate
  modified_base 9: mod_base = OTHER; note = 2'-O-methyluridine-3'-phosphate
  modified_base 10: mod_base = OTHER; note = 2'-O-methyladenosine-3'-phosphate
  modified_base 11: mod_base = OTHER; note = 2'-O-methylguanosine-3'-phosphate
  modified_base 12: mod_base = OTHER; note = 2'-O-methyladenosine-3'-phosphate
  modified_base 13: mod_base = OTHER; note = 2'-O-methyladenosine-3'-phosphate
  modified_base 14: mod_base = OTHER; note = 2'-deoxy-2'-fluorouridine-3'-phosphate
  modified_base 15: mod_base = OTHER; note = 2'-O-methylguanosine-3'-phosphate
  modified_base 16: mod_base = OTHER; note = 2'-deoxy-2'-fluoroadenosine-3'-phosphate
  modified_base 17: mod_base = OTHER; note = 2'-O-methyladenosine-3'-phosphate
  modified_base 18: mod_base = OTHER; note = 2'-O-methyladenosine-3'-phosphate
  modified_base 19: mod_base = OTHER; note = 2'-O-methyladenosine-3'-phosphate
  modified_base 20: mod_base = OTHER; note = 2'-O-methylcytidine-3'-phosphate
  modified_base 21: mod_base = OTHER; note = 2'-O-methyluridine-3'-phosphorothioate
  modified_base 22: mod_base = OTHER; note = 2'-O-methylguanosine-3'-phosphorothioate
  modified_base 23: mod_base = OTHER; note = 2'-O-methyluridine
tccatgcatagaatgaaaactgt

SEQ ID NO: 13306 - RNA, 23 nt, synthetic construct
  source 1..23: mol_type = other RNA
  modified_base 1: mod_base = OTHER; note = 2'-O-methyluridine-3'-phosphorothioate 5'-(E)-Vinylphosphonate
  modified_base 2: mod_base = OTHER; note = 2'-deoxy-2'-fluoroadenosine-3'-phosphorothioate
  modified_base 3: mod_base = OTHER; note = 2'-O-methyladenosine-3'-phosphate
  modified_base 4: mod_base = OTHER; note = 2'-O-methyladenosine-3'-phosphate
  modified_base 5: mod_base = OTHER; note = 2'-O-methyladenosine-3'-phosphate
  modified_base 6: mod_base = OTHER; note = 2'-deoxy-2'-fluorouridine-3'-phosphate
  modified_base 7: mod_base = OTHER; note = 2'-O-methyluridine-3'-phosphate
  modified_base 8: mod_base = OTHER; note = 2'-O-methyluridine-3'-phosphate
  modified_base 9: mod_base = OTHER; note = 2'-O-methyladenosine-3'-phosphate
  modified_base 10: mod_base = OTHER; note = 2'-O-methylguanosine-3'-phosphate
  modified_base 11: mod_base = OTHER; note = 2'-O-methylguanosine-3'-phosphate
  modified_base 12: mod_base = OTHER; note = 2'-O-methylcytidine-3'-phosphate
  modified_base 13: mod_base = OTHER; note = 2'-O-methyladenosine-3'-phosphate
  modified_base 14: mod_base = OTHER; note = 2'-deoxy-2'-fluorocytidine-3'-phosphate
  modified_base 15: mod_base = OTHER; note = 2'-O-methyladenosine-3'-phosphate
  modified_base 16: mod_base = OTHER; note = 2'-deoxy-2'-fluorocytidine-3'-phosphate
  modified_base 17: mod_base = OTHER; note = 2'-O-methyladenosine-3'-phosphate
  modified_base 18: mod_base = OTHER; note = 2'-O-methyladenosine-3'-phosphate
  modified_base 19: mod_base = OTHER; note = 2'-O-methyluridine-3'-phosphate
  modified_base 20: mod_base = OTHER; note = 2'-O-methylcytidine-3'-phosphate
  modified_base 21: mod_base = OTHER; note = 2'-O-methylcytidine-3'-phosphorothioate
  modified_base 22: mod_base = OTHER; note = 2'-O-methyluridine-3'-phosphorothioate
  modified_base 23: mod_base = OTHER; note = 2'-O-methylcytidine
taaaatttaggcacacaatcctc

SEQ ID NO: 13307 - RNA, 23 nt, synthetic construct
  source 1..23: mol_type = other RNA
  modified_base 1: mod_base = OTHER; note = 2'-O-methyluridine-3'-phosphorothioate 5'-(E)-Vinylphosphonate
  modified_base 2: mod_base = OTHER; note = 2'-deoxy-2'-fluoroadenosine-3'-phosphorothioate
  modified_base 3: mod_base = OTHER; note = 2'-O-methyluridine-3'-phosphate
  modified_base 4: mod_base = OTHER; note = 2'-O-methyluridine-3'-phosphate
  modified_base 5: mod_base = OTHER; note = 2'-O-methyluridine-3'-phosphate
  modified_base 6: mod_base = OTHER; note = 2'-deoxy-2'-fluoroguanosine-3'-phosphate
  modified_base 7: mod_base = OTHER; note = 2'-O-methyluridine-3'-phosphate
  modified_base 8: mod_base = OTHER; note = 2'-O-methyluridine-3'-phosphate
  modified_base 9: mod_base = OTHER; note = 2'-O-methyladenosine-3'-phosphate
  modified_base 10: mod_base = OTHER; note = 2'-O-methylguanosine-3'-phosphate
  modified_base 11: mod_base = OTHER; note = 2'-O-methyladenosine-3'-phosphate
  modified_base 12: mod_base = OTHER; note = 2'-O-methylcytidine-3'-phosphate
  modified_base 13: mod_base = OTHER; note = 2'-O-methyladenosine-3'-phosphate
  modified_base 14: mod_base = OTHER; note = 2'-deoxy-2'-fluoroadenosine-3'-phosphate
  modified_base 15: mod_base = OTHER; note = 2'-O-methyladenosine-3'-phosphate
  modified_base 16: mod_base = OTHER; note = 2'-deoxy-2'-fluoroadenosine-3'-phosphate
  modified_base 17: mod_base = OTHER; note = 2'-O-methyluridine-3'-phosphate
  modified_base 18: mod_base = OTHER; note = 2'-O-methyluridine-3'-phosphate
  modified_base 19: mod_base = OTHER; note = 2'-O-methyluridine-3'-phosphate
  modified_base 20: mod_base = OTHER; note = 2'-O-methyladenosine-3'-phosphate
  modified_base 21: mod_base = OTHER; note = 2'-O-methylguanosine-3'-phosphorothioate
  modified_base 22: mod_base = OTHER; note = 2'-O-methylguanosine-3'-phosphorothioate
  modified_base 23: mod_base = OTHER; note = 2'-O-methylcytidine
tatttgttagacaaaatttaggc

SEQ ID NO: 13308 - RNA, 23 nt, synthetic construct
  source 1..23: mol_type = other RNA
  modified_base 1: mod_base = OTHER; note = 2'-O-methyluridine-3'-phosphorothioate 5'-(E)-Vinylphosphonate
  modified_base 2: mod_base = OTHER; note = 2'-deoxy-2'-fluorouridine-3'-phosphorothioate
  modified_base 3: mod_base = OTHER; note = 2'-O-methyladenosine-3'-phosphate
  modified_base 4: mod_base = OTHER; note = 2'-O-methyluridine-3'-phosphate
  modified_base 5: mod_base = OTHER; note = 2'-O-methyluridine-3'-phosphate
  modified_base 6: mod_base = OTHER; note = 2'-deoxy-2'-fluoroadenosine-3'-phosphate
  modified_base 7: mod_base = OTHER; note = 2'-O-methylguanosine-3'-phosphate
  modified_base 8: mod_base = OTHER; note = 2'-O-methyluridine-3'-phosphate
  modified_base 9: mod_base = OTHER; note = 2'-O-methyladenosine-3'-phosphate
  modified_base 10: mod_base = OTHER; note = 2'-O-methyladenosine-3'-phosphate
  modified_base 11: mod_base = OTHER; note = 2'-O-methyladenosine-3'-phosphate
  modified_base 12: mod_base = OTHER; note = 2'-O-methyluridine-3'-phosphate
  modified_base 13: mod_base = OTHER; note = 2'-O-methylguanosine-3'-phosphate
  modified_base 14: mod_base = OTHER; note = 2'-deoxy-2'-fluorouridine-3'-phosphate
  modified_base 15: mod_base = OTHER; note = 2'-O-methylcytidine-3'-phosphate
  modified_base 16: mod_base = OTHER; note = 2'-deoxy-2'-fluoroadenosine-3'-phosphate
  modified_base 17: mod_base = OTHER; note = 2'-O-methyluridine-3'-phosphate
  modified_base 18: mod_base = OTHER; note = 2'-O-methyluridine-3'-phosphate
  modified_base 19: mod_base = OTHER; note = 2'-O-methylcytidine-3'-phosphate
  modified_base 20: mod_base = OTHER; note = 2'-O-methyluridine-3'-phosphate
  modified_base 21: mod_base = OTHER; note = 2'-O-methyladenosine-3'-phosphorothioate
  modified_base 22: mod_base = OTHER; note = 2'-O-methylcytidine-3'-phosphorothioate
  modified_base 23: mod_base = OTHER; note = 2'-O-methylguanosine
ttattagtaaatgtcattctacg

SEQ ID NO: 13309 - RNA, 23 nt, synthetic construct
  source 1..23: mol_type = other RNA
  modified_base 1: mod_base = OTHER; note = 2'-O-methyluridine-3'-phosphorothioate 5'-(E)-Vinylphosphonate
  modified_base 2: mod_base = OTHER; note = 2'-deoxy-2'-fluorouridine-3'-phosphorothioate
  modified_base 3: mod_base = OTHER; note = 2'-O-methylguanosine-3'-phosphate
  modified_base 4: mod_base = OTHER; note = 2'-O-methyluridine-3'-phosphate
  modified_base 5: mod_base = OTHER; note = 2'-O-methyluridine-3'-phosphate
  modified_base 6: mod_base = OTHER; note = 2'-deoxy-2'-fluoroadenosine-3'-phosphate
  modified_base 7: mod_base = OTHER; note = 2'-O-methylguanosine-3'-phosphate
  modified_base 8: mod_base = OTHER; note = 2'-O-methyladenosine-3'-phosphate
  modified_base 9: mod_base = OTHER; note = 2'-O-methylcytidine-3'-phosphate
  modified_base 10: mod_base = OTHER; note = 2'-O-methyladenosine-3'-phosphate
  modified_base 11: mod_base = OTHER; note = 2'-O-methyladenosine-3'-phosphate
  modified_base 12: mod_base = OTHER; note = 2'-O-methyladenosine-3'-phosphate
  modified_base 13: mod_base = OTHER; note = 2'-O-methyladenosine-3'-phosphate
  modified_base 14: mod_base = OTHER; note = 2'-deoxy-2'-fluorouridine-3'-phosphate
  modified_base 15: mod_base = OTHER; note = 2'-O-methyluridine-3'-phosphate
  modified_base 16: mod_base = OTHER; note = 2'-deoxy-2'-fluorouridine-3'-phosphate
  modified_base 17: mod_base = OTHER; note = 2'-O-methyladenosine-3'-phosphate
  modified_base 18: mod_base = OTHER; note = 2'-O-methylguanosine-3'-phosphate
  modified_base 19: mod_base = OTHER; note = 2'-O-methylguanosine-3'-phosphate
  modified_base 20: mod_base = OTHER; note = 2'-O-methylcytidine-3'-phosphate
  modified_base 21: mod_base = OTHER; note = 2'-O-methyladenosine-3'-phosphorothioate
  modified_base 22: mod_base = OTHER; note = 2'-O-methylcytidine-3'-phosphorothioate
  modified_base 23: mod_base = OTHER; note = 2'-O-methyladenosine
ttgttagacaaaatttaggcaca

SEQ ID NO: 13310 - RNA, 23 nt, synthetic construct
  source 1..23: mol_type = other RNA
  modified_base 1: mod_base = OTHER; note = 2'-O-methyluridine-3'-phosphorothioate 5'-(E)-Vinylphosphonate
  modified_base 2: mod_base = OTHER; note = 2'-deoxy-2'-fluorocytidine-3'-phosphorothioate
  modified_base 3: mod_base = OTHER; note = 2'-O-methyladenosine-3'-phosphate
  modified_base 4: mod_base = OTHER; note = 2'-O-methyluridine-3'-phosphate
  modified_base 5: mod_base = OTHER; note = 2'-O-methyluridine-3'-phosphate
  modified_base 6: mod_base = OTHER; note = 2'-deoxy-2'-fluorouridine-3'-phosphate
  modified_base 7: mod_base = OTHER; note = 2'-O-methylguanosine-3'-phosphate
  modified_base 8: mod_base = OTHER; note = 2'-O-methyluridine-3'-phosphate
  modified_base 9: mod_base = OTHER; note = 2'-O-methyluridine-3'-phosphate
  modified_base 10: mod_base = OTHER; note = 2'-O-methyladenosine-3'-phosphate
  modified_base 11: mod_base = OTHER; note = 2'-O-methylguanosine-3'-phosphate
  modified_base 12: mod_base = OTHER; note = 2'-O-methyladenosine-3'-phosphate
  modified_base 13: mod_base = OTHER; note = 2'-O-methylcytidine-3'-phosphate
  modified_base 14: mod_base = OTHER; note = 2'-deoxy-2'-fluoroadenosine-3'-phosphate
  modified_base 15: mod_base = OTHER; note = 2'-O-methyladenosine-3'-phosphate
  modified_base 16: mod_base = OTHER; note = 2'-deoxy-2'-fluoroadenosine-3'-phosphate
  modified_base 17: mod_base = OTHER; note = 2'-O-methyladenosine-3'-phosphate
  modified_base 18: mod_base = OTHER; note = 2'-O-methyluridine-3'-phosphate
  modified_base 19: mod_base = OTHER; note = 2'-O-methyluridine-3'-phosphate
  modified_base 20: mod_base = OTHER; note = 2'-O-methyluridine-3'-phosphate
  modified_base 21: mod_base = OTHER; note = 2'-O-methyladenosine-3'-phosphorothioate
  modified_base 22: mod_base = OTHER; note = 2'-O-methylguanosine-3'-phosphorothioate
  modified_base 23: mod_base = OTHER; note = 2'-O-methylguanosine
tcatttgttagacaaaatttagg

SEQ ID NO: 13311 - RNA, 23 nt, synthetic construct
  source 1..23: mol_type = other RNA
  modified_base 1: mod_base = OTHER; note = 2'-O-methyluridine-3'-phosphorothioate 5'-(E)-Vinylphosphonate
  modified_base 2: mod_base = OTHER; note = 2'-deoxy-2'-fluoroguanosine-3'-phosphorothioate
  modified_base 3: mod_base = OTHER; note = 2'-O-methylcytidine-3'-phosphate
  modified_base 4: mod_base = OTHER; note = 2'-O-methyladenosine-3'-phosphate
  modified_base 5: mod_base = OTHER; note = 2'-O-methyluridine-3'-phosphate
  modified_base 6: mod_base = OTHER; note = 2'-deoxy-2'-fluorouridine-3'-phosphate
  modified_base 7: mod_base = OTHER; note = 2'-O-methyluridine-3'-phosphate
  modified_base 8: mod_base = OTHER; note = 2'-O-methylguanosine-3'-phosphate
  modified_base 9: mod_base = OTHER; note = 2'-O-methyluridine-3'-phosphate
  modified_base 10: mod_base = OTHER; note = 2'-O-methyluridine-3'-phosphate
  modified_base 11: mod_base = OTHER; note = 2'-O-methyladenosine-3'-phosphate
  modified_base 12: mod_base = OTHER; note = 2'-O-methylguanosine-3'-phosphate
  modified_base 13: mod_base = OTHER; note = 2'-O-methyladenosine-3'-phosphate
  modified_base 14: mod_base = OTHER; note = 2'-deoxy-2'-fluorocytidine-3'-phosphate
  modified_base 15: mod_base = OTHER; note = 2'-O-methyladenosine-3'-phosphate
  modified_base 16: mod_base = OTHER; note = 2'-deoxy-2'-fluoroadenosine-3'-phosphate
  modified_base 17: mod_base = OTHER; note = 2'-O-methyladenosine-3'-phosphate
  modified_base 18: mod_base = OTHER; note = 2'-O-methyladenosine-3'-phosphate
  modified_base 19: mod_base = OTHER; note = 2'-O-methyluridine-3'-phosphate
  modified_base 20: mod_base = OTHER; note = 2'-O-methyluridine-3'-phosphate
  modified_base 21: mod_base = OTHER; note = 2'-O-methyluridine-3'-phosphorothioate
  modified_base 22: mod_base = OTHER; note = 2'-O-methyladenosine-3'-phosphorothioate
  modified_base 23: mod_base = OTHER; note = 2'-O-methylguanosine
tgcatttgttagacaaaatttag

SEQ ID NO: 13312 - RNA, 23 nt, synthetic construct
  source 1..23: mol_type = other RNA
  modified_base 1: mod_base = OTHER; note = 2'-O-methyluridine-3'-phosphorothioate 5'-(E)-Vinylphosphonate
  modified_base 2: mod_base = OTHER; note = 2'-deoxy-2'-fluorocytidine-3'-phosphorothioate
  modified_base 3: mod_base = OTHER; note = 2'-O-methyluridine-3'-phosphate
  modified_base 4: mod_base = OTHER; note = 2'-O-methyluridine-3'-phosphate
  modified_base 5: mod_base = OTHER; note = 2'-O-methylguanosine-3'-phosphate
  modified_base 6: mod_base = OTHER; note = 2'-deoxy-2'-fluorocytidine-3'-phosphate
  modified_base 7: mod_base = OTHER; note = 2'-O-methyladenosine-3'-phosphate
  modified_base 8: mod_base = OTHER; note = 2'-O-methyluridine-3'-phosphate
  modified_base 9: mod_base = OTHER; note = 2'-O-methyluridine-3'-phosphate
  modified_base 10: mod_base = OTHER; note = 2'-O-methyluridine-3'-phosphate
  modified_base 11: mod_base = OTHER; note = 2'-O-methylguanosine-3'-phosphate
  modified_base 12: mod_base = OTHER; note = 2'-O-methyluridine-3'-phosphate
  modified_base 13: mod_base = OTHER; note = 2'-O-methyluridine-3'-phosphate
  modified_base 14: mod_base = OTHER; note = 2'-deoxy-2'-fluoroadenosine-3'-phosphate
  modified_base 15: mod_base = OTHER; note = 2'-O-methylguanosine-3'-phosphate
  modified_base 16: mod_base = OTHER; note = 2'-deoxy-2'-fluoroadenosine-3'-phosphate
  modified_base 17: mod_base = OTHER; note = 2'-O-methylcytidine-3'-phosphate
  modified_base 18: mod_base = OTHER; note = 2'-O-methyladenosine-3'-phosphate
  modified_base 19: mod_base = OTHER; note = 2'-O-methyladenosine-3'-phosphate
  modified_base 20: mod_base = OTHER; note = 2'-O-methyladenosine-3'-phosphate
  modified_base 21: mod_base = OTHER; note = 2'-O-methyladenosine-3'-phosphorothioate
  modified_base 22: mod_base = OTHER; note = 2'-O-methyluridine-3'-phosphorothioate
  modified_base 23: mod_base = OTHER; note = 2'-O-methyluridine
tcttgcatttgttagacaaaatt

SEQ ID NO: 13313 - RNA, 23 nt, synthetic construct
  source 1..23: mol_type = other RNA
  modified_base 1: mod_base = OTHER; note = 2'-O-methyluridine-3'-phosphorothioate 5'-(E)-Vinylphosphonate
  modified_base 2: mod_base = OTHER; note = 2'-deoxy-2'-fluorouridine-3'-phosphorothioate
  modified_base 3: mod_base = OTHER; note = 2'-O-methyladenosine-3'-phosphate
  modified_base 4: mod_base = OTHER; note = 2'-O-methyluridine-3'-phosphate
  modified_base 5: mod_base = OTHER; note = 2'-O-methyluridine-3'-phosphate
  modified_base 6: mod_base = OTHER; note = 2'-deoxy-2'-fluoroadenosine-3'-phosphate
  modified_base 7: mod_base = OTHER; note = 2'-O-methyluridine-3'-phosphate
  modified_base 8: mod_base = OTHER; note = 2'-O-methyluridine-3'-phosphate
  modified_base 9: mod_base = OTHER; note = 2'-O-methyluridine-3'-phosphate
  modified_base 10: mod_base = OTHER; note = 2'-O-methyladenosine-3'-phosphate
  modified_base 11: mod_base = OTHER; note = 2'-O-methylguanosine-3'-phosphate
  modified_base 12: mod_base = OTHER; note = 2'-O-methylcytidine-3'-phosphate
  modified_base 13: mod_base = OTHER; note = 2'-O-methylcytidine-3'-phosphate
  modified_base 14: mod_base = OTHER; note = 2'-deoxy-2'-fluorouridine-3'-phosphate
  modified_base 15: mod_base = OTHER; note = 2'-O-methyladenosine-3'-phosphate
  modified_base 16: mod_base = OTHER; note = 2'-deoxy-2'-fluorouridine-3'-phosphate
  modified_base 17: mod_base = OTHER; note = 2'-O-methylguanosine-3'-phosphate
  modified_base 18: mod_base = OTHER; note = 2'-O-methylguanosine-3'-phosphate
  modified_base 19: mod_base = OTHER; note = 2'-O-methyladenosine-3'-phosphate
  modified_base 20: mod_base = OTHER; note = 2'-O-methyladenosine-3'-phosphate
  modified_base 21: mod_base = OTHER; note = 2'-O-methylguanosine-3'-phosphorothioate
  modified_base 22: mod_base = OTHER; note = 2'-O-methyladenosine-3'-phosphorothioate
  modified_base 23: mod_base = OTHER; note = 2'-O-methyladenosine
ttattatttagcctatggaagaa

SEQ ID NO: 13314 - RNA, 23 nt, synthetic construct
  source 1..23: mol_type = other RNA
  modified_base 1: mod_base = OTHER; note = 2'-O-methyluridine-3'-phosphorothioate 5'-(E)-Vinylphosphonate
  modified_base 2: mod_base = OTHER; note = 2'-deoxy-2'-fluorocytidine-3'-phosphorothioate
  modified_base 3: mod_base = OTHER; note = 2'-O-methyluridine-3'-phosphate
  modified_base 4: mod_base = OTHER; note = 2'-O-methyladenosine-3'-phosphate
  modified_base 5: mod_base = OTHER; note = 2'-O-methylguanosine-3'-phosphate
  modified_base 6: mod_base = OTHER; note = 2'-deoxy-2'-fluoroadenosine-3'-phosphate
  modified_base 7: mod_base = OTHER; note = 2'-O-methyladenosine-3'-phosphate
  modified_base 8: mod_base = OTHER; note = 2'-O-methyluridine-3'-phosphate
  modified_base 9: mod_base = OTHER; note = 2'-O-methyluridine-3'-phosphate
  modified_base 10: mod_base = OTHER; note = 2'-O-methyluridine-3'-phosphate
  modified_base 11: mod_base = OTHER; note = 2'-O-methyladenosine-3'-phosphate
  modified_base 12: mod_base = OTHER; note = 2'-O-methyladenosine-3'-phosphate
  modified_base 13: mod_base = OTHER; note = 2'-O-methyluridine-3'-phosphate
  modified_base 14: mod_base = OTHER; note = 2'-deoxy-2'-fluoroadenosine-3'-phosphate
  modified_base 15: mod_base = OTHER; note = 2'-O-methyluridine-3'-phosphate
  modified_base 16: mod_base = OTHER; note = 2'-deoxy-2'-fluorouridine-3'-phosphate
  modified_base 17: mod_base = OTHER; note = 2'-O-methyluridine-3'-phosphate
  modified_base 18: mod_base = OTHER; note = 2'-O-methyluridine-3'-phosphate
  modified_base 19: mod_base = OTHER; note = 2'-O-methylguanosine-3'-phosphate
  modified_base 20: mod_base = OTHER; note = 2'-O-methylguanosine-3'-phosphate
  modified_base 21: mod_base = OTHER; note = 2'-O-methylcytidine-3'-phosphorothioate
  modified_base 22: mod_base = OTHER; note = 2'-O-methyluridine-3'-phosphorothioate
  modified_base 23: mod_base = OTHER; note = 2'-O-methylcytidine
tctagaatttaatattttggctc

SEQ ID NO: 13315 - RNA, 23 nt, synthetic construct
  source 1..23: mol_type = other RNA
  modified_base 1: mod_base = OTHER; note = 2'-O-methyluridine-3'-phosphorothioate 5'-(E)-Vinylphosphonate
  modified_base 2: mod_base = OTHER; note = 2'-deoxy-2'-fluorocytidine-3'-phosphorothioate
  modified_base 3: mod_base = OTHER; note = 2'-O-methylguanosine-3'-phosphate
  modified_base 4: mod_base = OTHER; note = 2'-O-methylguanosine-3'-phosphate
  modified_base 5: mod_base = OTHER; note = 2'-O-methyladenosine-3'-phosphate
  modified_base 6: mod_base = OTHER; note = 2'-deoxy-2'-fluoroadenosine-3'-phosphate
  modified_base 7: mod_base = OTHER; note = 2'-O-methyladenosine-3'-phosphate
  modified_base 8: mod_base = OTHER; note = 2'-O-methyladenosine-3'-phosphate
  modified_base 9: mod_base = OTHER; note = 2'-O-methylguanosine-3'-phosphate
  modified_base 10: mod_base = OTHER; note = 2'-O-methyladenosine-3'-phosphate
  modified_base 11: mod_base = OTHER; note = 2'-O-methyladenosine-3'-phosphate
  modified_base 12: mod_base = OTHER; note = 2'-O-methylcytidine-3'-phosphate
  modified_base 13: mod_base = OTHER; note = 2'-O-methyluridine-3'-phosphate
  modified_base 14: mod_base = OTHER; note = 2'-deoxy-2'-fluoroadenosine-3'-phosphate
  modified_base 15: mod_base = OTHER; note = 2'-O-methylguanosine-3'-phosphate
  modified_base 16: mod_base = OTHER; note = 2'-deoxy-2'-fluoroadenosine-3'-phosphate
  modified_base 17: mod_base = OTHER; note = 2'-O-methyladenosine-3'-phosphate
  modified_base 18: mod_base = OTHER; note = 2'-O-methyluridine-3'-phosphate
  modified_base 19: mod_base = OTHER; note = 2'-O-methyluridine-3'-phosphate
  modified_base 20: mod_base = OTHER; note = 2'-O-methyluridine-3'-phosphate
  modified_base 21: mod_base = OTHER; note = 2'-O-methyladenosine-3'-phosphorothioate
  modified_base 22: mod_base = OTHER; note = 2'-O-methyladenosine-3'-phosphorothioate
  modified_base 23: mod_base = OTHER; note = 2'-O-methyluridine
tcggaaaagaactagaatttaat

SEQ ID NO: 13316 - RNA, 23 nt, synthetic construct
  source 1..23: mol_type = other RNA
  modified_base 1: mod_base = OTHER; note = 2'-O-methyluridine-3'-phosphorothioate 5'-(E)-Vinylphosphonate
  modified_base 2: mod_base = OTHER; note = 2'-deoxy-2'-fluoroguanosine-3'-phosphorothioate
  modified_base 3: mod_base = OTHER; note = 2'-O-methylcytidine-3'-phosphate
  modified_base 4: mod_base = OTHER; note = 2'-O-methylguanosine-3'-phosphate
  modified_base 5: mod_base = OTHER; note = 2'-O-methylguanosine-3'-phosphate
  modified_base 6: mod_base = OTHER; note = 2'-deoxy-2'-fluoroadenosine-3'-phosphate
  modified_base 7: mod_base = OTHER; note = 2'-O-methyladenosine-3'-phosphate
  modified_base 8: mod_base = OTHER; note = 2'-O-methyladenosine-3'-phosphate
  modified_base 9: mod_base = OTHER; note = 2'-O-methyladenosine-3'-phosphate
  modified_base 10: mod_base = OTHER; note = 2'-O-methylguanosine-3'-phosphate
  modified_base 11: mod_base = OTHER; note = 2'-O-methyladenosine-3'-phosphate
  modified_base 12: mod_base = OTHER; note = 2'-O-methyladenosine-3'-phosphate
  modified_base 13: mod_base = OTHER; note = 2'-O-methylcytidine-3'-phosphate
  modified_base 14: mod_base = OTHER; note = 2'-deoxy-2'-fluorouridine-3'-phosphate
  modified_base 15: mod_base = OTHER; note = 2'-O-methyladenosine-3'-phosphate
  modified_base 16: mod_base = OTHER; note = 2'-deoxy-2'-fluoroguanosine-3'-phosphate
  modified_base 17: mod_base = OTHER; note = 2'-O-methyladenosine-3'-phosphate
  modified_base 18: mod_base = OTHER; note = 2'-O-methyladenosine-3'-phosphate
  modified_base 19: mod_base = OTHER; note = 2'-O-methyluridine-3'-phosphate
  modified_base 20: mod_base = OTHER; note = 2'-O-methyluridine-3'-phosphate
  modified_base 21: mod_base = OTHER; note = 2'-O-methyluridine-3'-phosphorothioate
  modified_base 22: mod_base = OTHER; note = 2'-O-methyladenosine-3'-phosphorothioate
  modified_base 23: mod_base = OTHER; note = 2'-O-methyladenosine
tgcggaaaagaactagaatttaa

SEQ ID NO: 13317 - RNA, 23 nt, synthetic construct
  source 1..23: mol_type = other RNA
  modified_base 1: mod_base = OTHER; note = 2'-O-methyluridine-3'-phosphorothioate 5'-(E)-Vinylphosphonate
  modified_base 2: mod_base = OTHER; note = 2'-deoxy-2'-fluorouridine-3'-phosphorothioate
  modified_base 3: mod_base = OTHER; note = 2'-O-methylguanosine-3'-phosphate
  modified_base 4: mod_base = OTHER; note = 2'-O-methylcytidine-3'-phosphate
  modified_base 5: mod_base = OTHER; note = 2'-O-methylguanosine-3'-phosphate
  modified_base 6: mod_base = OTHER; note = 2'-deoxy-2'-fluoroguanosine-3'-phosphate
  modified_base 7: mod_base = OTHER; note = 2'-O-methyladenosine-3'-phosphate
  modified_base 8: mod_base = OTHER; note = 2'-O-methyladenosine-3'-phosphate
  modified_base 9: mod_base = OTHER; note = 2'-O-methyladenosine-3'-phosphate
  modified_base 10: mod_base = OTHER; note = 2'-O-methyladenosine-3'-phosphate
  modified_base 11: mod_base = OTHER; note = 2'-O-methylguanosine-3'-phosphate
  modified_base 12: mod_base = OTHER; note = 2'-O-methyladenosine-3'-phosphate
  modified_base 13: mod_base = OTHER; note = 2'-O-methyladenosine-3'-phosphate
  modified_base 14: mod_base = OTHER; note = 2'-deoxy-2'-fluorocytidine-3'-phosphate
  modified_base 15: mod_base = OTHER; note = 2'-O-methyluridine-3'-phosphate
  modified_base 16: mod_base = OTHER; note = 2'-deoxy-2'-fluoroadenosine-3'-phosphate
  modified_base 17: mod_base = OTHER; note = 2'-O-methylguanosine-3'-phosphate
  modified_base 18: mod_base = OTHER; note = 2'-O-methyladenosine-3'-phosphate
  modified_base 19: mod_base = OTHER; note = 2'-O-methyladenosine-3'-phosphate
  modified_base 20: mod_base = OTHER; note = 2'-O-methyluridine-3'-phosphate
  modified_base 21: mod_base = OTHER; note = 2'-O-methyluridine-3'-phosphorothioate
  modified_base 22: mod_base = OTHER; note = 2'-O-methyluridine-3'-phosphorothioate
  modified_base 23: mod_base = OTHER; note = 2'-O-methyladenosine
ttgcggaaaagaactagaattta

SEQ ID NO: 13318 - RNA, 23 nt, synthetic construct
  source 1..23: mol_type = other RNA
  modified_base 1: mod_base = OTHER; note = 2'-O-methyluridine-3'-phosphorothioate 5'-(E)-Vinylphosphonate
  modified_base 2: mod_base = OTHER; note = 2'-deoxy-2'-fluorouridine-3'-phosphorothioate
  modified_base 3: mod_base = OTHER; note = 2'-O-methylcytidine-3'-phosphate
  modified_base 4: mod_base = OTHER; note = 2'-O-methyladenosine-3'-phosphate
  modified_base 5: mod_base = OTHER; note = 2'-O-methyluridine-3'-phosphate
  modified_base 6: mod_base = OTHER; note = 2'-deoxy-2'-fluorouridine-3'-phosphate
  modified_base 7: mod_base = OTHER; note = 2'-O-methylguanosine-3'-phosphate
  modified_base 8: mod_base = OTHER; note = 2'-O-methylcytidine-3'-phosphate
  modified_base 9: mod_base = OTHER; note = 2'-O-methylguanosine-3'-phosphate
  modified_base 10: mod_base = OTHER; note = 2'-O-methylguanosine-3'-phosphate
  modified_base 11: mod_base = OTHER; note = 2'-O-methyladenosine-3'-phosphate
  modified_base 12: mod_base = OTHER; note = 2'-O-methyladenosine-3'-phosphate
  modified_base 13: mod_base = OTHER; note = 2'-O-methyladenosine-3'-phosphate
  modified_base 14: mod_base = OTHER; note = 2'-deoxy-2'-fluoroadenosine-3'-phosphate
  modified_base 15: mod_base = OTHER; note = 2'-O-methylguanosine-3'-phosphate
  modified_base 16: mod_base = OTHER; note = 2'-deoxy-2'-fluoroadenosine-3'-phosphate
  modified_base 17: mod_base = OTHER; note = 2'-O-methyladenosine-3'-phosphate
  modified_base 18: mod_base = OTHER; note = 2'-O-methylcytidine-3'-phosphate
  modified_base 19: mod_base = OTHER; note = 2'-O-methyluridine-3'-phosphate
  modified_base 20: mod_base = OTHER; note = 2'-O-methyladenosine-3'-phosphate
  modified_base 21: mod_base = OTHER; note = 2'-O-methylguanosine-3'-phosphorothioate
  modified_base 22: mod_base = OTHER; note = 2'-O-methyladenosine-3'-phosphorothioate
  modified_base 23: mod_base = OTHER; note = 2'-O-methyladenosine
ttcattgcggaaaagaactagaa

SEQ ID NO: 13319 - RNA, 23 nt, synthetic construct
  source 1..23: mol_type = other RNA
  modified_base 1: mod_base = OTHER; note = 2'-O-methyluridine-3'-phosphorothioate 5'-(E)-Vinylphosphonate
  modified_base 2: mod_base = OTHER; note = 2'-deoxy-2'-fluorouridine-3'-phosphorothioate
  modified_base 3: mod_base = OTHER; note = 2'-O-methyluridine-3'-phosphate
  modified_base 4: mod_base = OTHER; note = 2'-O-methylguanosine-3'-phosphate
  modified_base 5: mod_base = OTHER; note = 2'-O-methylcytidine-3'-phosphate
  modified_base 6: mod_base = OTHER; note = 2'-deoxy-2'-fluoroguanosine-3'-phosphate
  modified_base 7: mod_base = OTHER; note = 2'-O-methylguanosine-3'-phosphate
  modified_base 8: mod_base = OTHER; note = 2'-O-methyladenosine-3'-phosphate
  modified_base 9: mod_base = OTHER; note = 2'-O-methyladenosine-3'-phosphate
  modified_base 10: mod_base = OTHER; note = 2'-O-methyladenosine-3'-phosphate
  modified_base 11: mod_base = OTHER; note = 2'-O-methyladenosine-3'-phosphate
  modified_base 12: mod_base = OTHER; note = 2'-O-methylguanosine-3'-phosphate
  modified_base 13: mod_base = OTHER; note = 2'-O-methyladenosine-3'-phosphate
  modified_base 14: mod_base = OTHER; note = 2'-deoxy-2'-fluoroadenosine-3'-phosphate
  modified_base 15: mod_base = OTHER; note = 2'-O-methylcytidine-3'-phosphate
  modified_base 16: mod_base = OTHER; note = 2'-deoxy-2'-fluorouridine-3'-phosphate
  modified_base 17: mod_base = OTHER; note = 2'-O-methyladenosine-3'-phosphate
  modified_base 18: mod_base = OTHER; note = 2'-O-methylguanosine-3'-phosphate
  modified_base 19: mod_base = OTHER; note = 2'-O-methyladenosine-3'-phosphate
  modified_base 20: mod_base = OTHER; note = 2'-O-methyladenosine-3'-phosphate
  modified_base 21: mod_base = OTHER; note = 2'-O-methyluridine-3'-phosphorothioate
  modified_base 22: mod_base = OTHER; note = 2'-O-methyluridine-3'-phosphorothioate
  modified_base 23: mod_base = OTHER; note = 2'-O-methyluridine
tttgcggaaaagaactagaattt

SEQ ID NO: 13320 - RNA, 23 nt, synthetic construct
  source 1..23: mol_type = other RNA
  modified_base 1: mod_base = OTHER; note = 2'-O-methyluridine-3'-phosphorothioate 5'-(E)-Vinylphosphonate
  modified_base 2: mod_base = OTHER; note = 2'-deoxy-2'-fluoroadenosine-3'-phosphorothioate
  modified_base 3: mod_base = OTHER; note = 2'-O-methyluridine-3'-phosphate
  modified_base 4: mod_base = OTHER; note = 2'-O-methyluridine-3'-phosphate
  modified_base 5: mod_base = OTHER; note = 2'-O-methylguanosine-3'-phosphate
  modified_base 6: mod_base = OTHER; note = 2'-deoxy-2'-fluorocytidine-3'-phosphate
  modified_base 7: mod_base = OTHER; note = 2'-O-methylguanosine-3'-phosphate
  modified_base 8: mod_base = OTHER; note = 2'-O-methylguanosine-3'-phosphate
  modified_base 9: mod_base = OTHER; note = 2'-O-methyladenosine-3'-phosphate
  modified_base 10: mod_base = OTHER; note = 2'-O-methyladenosine-3'-phosphate
  modified_base 11: mod_base = OTHER; note = 2'-O-methyladenosine-3'-phosphate
  modified_base 12: mod_base = OTHER; note = 2'-O-methyladenosine-3'-phosphate
  modified_base 13: mod_base = OTHER; note = 2'-O-methylguanosine-3'-phosphate
  modified_base 14: mod_base = OTHER; note = 2'-deoxy-2'-fluoroadenosine-3'-phosphate
  modified_base 15: mod_base = OTHER; note = 2'-O-methyladenosine-3'-phosphate
  modified_base 16: mod_base = OTHER; note = 2'-deoxy-2'-fluorocytidine-3'-phosphate
  modified_base 17: mod_base = OTHER; note = 2'-O-methyluridine-3'-phosphate
  modified_base 18: mod_base = OTHER; note = 2'-O-methyladenosine-3'-phosphate
  modified_base 19: mod_base = OTHER; note = 2'-O-methylguanosine-3'-phosphate
  modified_base 20: mod_base = OTHER; note = 2'-O-methyladenosine-3'-phosphate
  modified_base 21: mod_base = OTHER; note = 2'-O-methyladenosine-3'-phosphorothioate
  modified_base 22: mod_base = OTHER; note = 2'-O-methyluridine-3'-phosphorothioate
  modified_base 23: mod_base = OTHER; note = 2'-O-methyluridine
tattgcggaaaagaactagaatt

SEQ ID NO: 13321 - RNA, 23 nt, synthetic construct
  source 1..23: mol_type = other RNA
  modified_base 1: mod_base = OTHER; note = 2'-O-methyluridine-3'-phosphorothioate 5'-(E)-Vinylphosphonate
  modified_base 2: mod_base = OTHER; note = 2'-deoxy-2'-fluorocytidine-3'-phosphorothioate
  modified_base 3: mod_base = OTHER; note = 2'-O-methyladenosine-3'-phosphate
  modified_base 4: mod_base = OTHER; note = 2'-O-methyluridine-3'-phosphate
  modified_base 5: mod_base = OTHER; note = 2'-O-methyluridine-3'-phosphate
  modified_base 6: mod_base = OTHER; note = 2'-deoxy-2'-fluoroguanosine-3'-phosphate
  modified_base 7: mod_base = OTHER; note = 2'-O-methylcytidine-3'-phosphate
  modified_base 8: mod_base = OTHER; note = 2'-O-methylguanosine-3'-phosphate
  modified_base 9: mod_base = OTHER; note = 2'-O-methylguanosine-3'-phosphate
  modified_base 10: mod_base = OTHER; note = 2'-O-methyladenosine-3'-phosphate
  modified_base 11: mod_base = OTHER; note = 2'-O-methyladenosine-3'-phosphate
  modified_base 12: mod_base = OTHER; note = 2'-O-methyladenosine-3'-phosphate
  modified_base 13: mod_base = OTHER; note = 2'-O-methyladenosine-3'-phosphate
  modified_base 14: mod_base = OTHER; note = 2'-deoxy-2'-fluoroguanosine-3'-phosphate
  modified_base 15: mod_base = OTHER; note = 2'-O-methyladenosine-3'-phosphate
  modified_base 16: mod_base = OTHER; note = 2'-deoxy-2'-fluoroadenosine-3'-phosphate
  modified_base 17: mod_base = OTHER; note = 2'-O-methylcytidine-3'-phosphate
  modified_base 18: mod_base = OTHER; note = 2'-O-methyluridine-3'-phosphate
  modified_base 19: mod_base = OTHER; note = 2'-O-methyladenosine-3'-phosphate
  modified_base 20: mod_base = OTHER; note = 2'-O-methylguanosine-3'-phosphate
  modified_base 21: mod_base = OTHER; note = 2'-O-methyladenosine-3'-phosphorothioate
  modified_base 22: mod_base = OTHER; note = 2'-O-methyladenosine-3'-phosphorothioate
  modified_base 23: mod_base = OTHER; note = 2'-O-methyluridine
tcattgcggaaaagaactagaat

SEQ ID NO: 13322 - RNA, 23 nt, synthetic construct
  source 1..23: mol_type = other RNA
  modified_base 1: mod_base = OTHER; note = 2'-O-methyluridine-3'-phosphorothioate 5'-(E)-Vinylphosphonate
  modified_base 2: mod_base = OTHER; note = 2'-deoxy-2'-fluoroguanosine-3'-phosphorothioate
  modified_base 3: mod_base = OTHER; note = 2'-O-methyluridine-3'-phosphate
  modified_base 4: mod_base = OTHER; note = 2'-O-methylcytidine-3'-phosphate
  modified_base 5: mod_base = OTHER; note = 2'-O-methyladenosine-3'-phosphate
  modified_base 6: mod_base = OTHER; note = 2'-deoxy-2'-fluorouridine-3'-phosphate
  modified_base 7: mod_base = OTHER; note = 2'-O-methyluridine-3'-phosphate
  modified_base 8: mod_base = OTHER; note = 2'-O-methylguanosine-3'-phosphate
  modified_base 9: mod_base = OTHER; note = 2'-O-methylcytidine-3'-phosphate
  modified_base 10: mod_base = OTHER; note = 2'-O-methylguanosine-3'-phosphate
  modified_base 11: mod_base = OTHER; note = 2'-O-methylguanosine-3'-phosphate
  modified_base 12: mod_base = OTHER; note = 2'-O-methyladenosine-3'-phosphate
  modified_base 13: mod_base = OTHER; note = 2'-O-methyladenosine-3'-phosphate
  modified_base 14: mod_base = OTHER; note = 2'-deoxy-2'-fluoroadenosine-3'-phosphate
  modified_base 15: mod_base = OTHER; note = 2'-O-methyladenosine-3'-phosphate
  modified_base 16: mod_base = OTHER; note = 2'-deoxy-2'-fluoroguanosine-3'-phosphate
  modified_base 17: mod_base = OTHER; note = 2'-O-methyladenosine-3'-phosphate
  modified_base 18: mod_base = OTHER; note = 2'-O-methyladenosine-3'-phosphate
  modified_base 19: mod_base = OTHER; note = 2'-O-methylcytidine-3'-phosphate
  modified_base 20: mod_base = OTHER; note = 2'-O-methyluridine-3'-phosphate
  modified_base 21: mod_base = OTHER; note = 2'-O-methyladenosine-3'-phosphorothioate
  modified_base 22: mod_base = OTHER; note = 2'-O-methylguanosine-3'-phosphorothioate
  modified_base 23: mod_base = OTHER; note = 2'-O-methyladenosine
tgtcattgcggaaaagaactaga

SEQ ID NO: 13323 - RNA, 23 nt, synthetic construct
  source 1..23: mol_type = other RNA
  modified_base 1: mod_base = OTHER; note = 2'-O-methyluridine-3'-phosphorothioate 5'-(E)-Vinylphosphonate
  modified_base 2: mod_base = OTHER; note = 2'-deoxy-2'-fluoroadenosine-3'-phosphorothioate
  modified_base 3: mod_base = OTHER; note = 2'-O-methylguanosine-3'-phosphate
  modified_base 4: mod_base = OTHER; note = 2'-O-methyluridine-3'-phosphate
  modified_base 5: mod_base = OTHER; note = 2'-O-methylcytidine-3'-phosphate
  modified_base 6: mod_base = OTHER; note = 2'-deoxy-2'-fluoroadenosine-3'-phosphate
  modified_base 7: mod_base = OTHER; note = 2'-O-methyluridine-3'-phosphate
  modified_base 8: mod_base = OTHER; note = 2'-O-methyluridine-3'-phosphate
  modified_base 9: mod_base = OTHER; note = 2'-O-methylguanosine-3'-phosphate
  modified_base 10: mod_base = OTHER; note = 2'-O-methylcytidine-3'-phosphate
  modified_base 11: mod_base = OTHER; note = 2'-O-methylguanosine-3'-phosphate
  modified_base 12: mod_base = OTHER; note = 2'-O-methylguanosine-3'-phosphate
  modified_base 13: mod_base = OTHER; note = 2'-O-methyladenosine-3'-phosphate
  modified_base 14: mod_base = OTHER; note = 2'-deoxy-2'-fluoroadenosine-3'-phosphate
  modified_base 15: mod_base = OTHER; note = 2'-O-methyladenosine-3'-phosphate
  modified_base 16: mod_base = OTHER; note = 2'-deoxy-2'-fluoroadenosine-3'-phosphate
  modified_base 17: mod_base = OTHER; note = 2'-O-methylguanosine-3'-phosphate
  modified_base 18: mod_base = OTHER; note = 2'-O-methyladenosine-3'-phosphate
  modified_base 19: mod_base = OTHER; note = 2'-O-methyladenosine-3'-phosphate
  modified_base 20: mod_base = OTHER; note = 2'-O-methylcytidine-3'-phosphate
  modified_base 21: mod_base = OTHER; note = 2'-O-methyluridine-3'-phosphorothioate
  modified_base 22: mod_base = OTHER; note = 2'-O-methyladenosine-3'-phosphorothioate
  modified_base 23: mod_base = OTHER; note = 2'-O-methylguanosine
tagtcattgcggaaaagaactag

SEQ ID NO: 13324 - RNA, 23 nt, synthetic construct
  source 1..23: mol_type = other RNA
  modified_base 1: mod_base = OTHER; note = 2'-O-methyluridine-3'-phosphorothioate 5'-(E)-Vinylphosphonate
  modified_base 2: mod_base = OTHER; note = 2'-deoxy-2'-fluorouridine-3'-phosphorothioate
  modified_base 3: mod_base = OTHER; note = 2'-O-methyladenosine-3'-phosphate
  modified_base 4: mod_base = OTHER; note = 2'-O-methylguanosine-3'-phosphate
  modified_base 5: mod_base = OTHER; note = 2'-O-methyluridine-3'-phosphate
  modified_base 6: mod_base = OTHER; note = 2'-deoxy-2'-fluorocytidine-3'-phosphate
  modified_base 7: mod_base = OTHER; note = 2'-O-methyladenosine-3'-phosphate
  modified_base 8: mod_base = OTHER; note = 2'-O-methyluridine-3'-phosphate
  modified_base 9: mod_base = OTHER; note = 2'-O-methyluridine-3'-phosphate
  modified_base 10: mod_base = OTHER; note = 2'-O-methylguanosine-3'-phosphate
  modified_base 11: mod_base = OTHER; note = 2'-O-methylcytidine-3'-phosphate
  modified_base 12: mod_base = OTHER; note = 2'-O-methylguanosine-3'-phosphate
  modified_base 13: mod_base = OTHER; note = 2'-O-methylguanosine-3'-phosphate
  modified_base 14: mod_base = OTHER; note = 2'-deoxy-2'-fluoroadenosine-3'-phosphate
  modified_base 15: mod_base = OTHER; note = 2'-O-methyladenosine-3'-phosphate
  modified_base 16: mod_base = OTHER; note = 2'-deoxy-2'-fluoroadenosine-3'-phosphate
  modified_base 17: mod_base = OTHER; note = 2'-O-methyladenosine-3'-phosphate
  modified_base 18: mod_base = OTHER; note = 2'-O-methylguanosine-3'-phosphate
  modified_base 19: mod_base = OTHER; note = 2'-O-methyladenosine-3'-phosphate
  modified_base 20: mod_base = OTHER; note = 2'-O-methyladenosine-3'-phosphate
  modified_base 21: mod_base = OTHER; note = 2'-O-methylcytidine-3'-phosphorothioate
  modified_base 22: mod_base = OTHER; note = 2'-O-methyluridine-3'-phosphorothioate
  modified_base 23: mod_base = OTHER; note = 2'-O-methyladenosine
ttagtcattgcggaaaagaacta

SEQ ID NO: 13325 - RNA, 23 nt, synthetic construct
  source 1..23: mol_type = other RNA
  modified_base 1: mod_base = OTHER; note = 2'-O-methyluridine-3'-phosphorothioate 5'-(E)-Vinylphosphonate
  modified_base 2: mod_base = OTHER; note = 2'-deoxy-2'-fluorocytidine-3'-phosphorothioate
  modified_base 3: mod_base = OTHER; note = 2'-O-methyluridine-3'-phosphate
  modified_base 4: mod_base = OTHER; note = 2'-O-methyladenosine-3'-phosphate
  modified_base 5: mod_base = OTHER; note = 2'-O-methylguanosine-3'-phosphate
  modified_base 6: mod_base = OTHER; note = 2'-deoxy-2'-fluorouridine-3'-phosphate
  modified_base 7: mod_base = OTHER; note = 2'-O-methylcytidine-3'-phosphate
  modified_base 8: mod_base = OTHER; note = 2'-O-methyladenosine-3'-phosphate
  modified_base 9: mod_base = OTHER; note = 2'-O-methyluridine-3'-phosphate
  modified_base 10: mod_base = OTHER; note = 2'-O-methyluridine-3'-phosphate
  modified_base 11: mod_base = OTHER; note = 2'-O-methylguanosine-3'-phosphate
  modified_base 12: mod_base = OTHER; note = 2'-O-methylcytidine-3'-phosphate
  modified_base 13: mod_base = OTHER; note = 2'-O-methylguanosine-3'-phosphate
  modified_base 14: mod_base = OTHER; note = 2'-deoxy-2'-fluoroguanosine-3'-phosphate
  modified_base 15: mod_base = OTHER; note = 2'-O-methyladenosine-3'-phosphate
  modified_base 16: mod_base = OTHER; note = 2'-deoxy-2'-fluoroadenosine-3'-phosphate
  modified_base 17: mod_base = OTHER; note = 2'-O-methyladenosine-3'-phosphate
  modified_base 18: mod_base = OTHER; note = 2'-O-methyladenosine-3'-phosphate
  modified_base 19: mod_base = OTHER; note = 2'-O-methylguanosine-3'-phosphate
  modified_base 20: mod_base = OTHER; note = 2'-O-methyladenosine-3'-phosphate
  modified_base 21: mod_base = OTHER; note = 2'-O-methyladenosine-3'-phosphorothioate
  modified_base 22: mod_base = OTHER; note = 2'-O-methylcytidine-3'-phosphorothioate
  modified_base 23: mod_base = OTHER; note = 2'-O-methyluridine
tctagtcattgcggaaaagaact

SEQ ID NO: 13326 - RNA, 23 nt, synthetic construct
  source 1..23: mol_type = other RNA
  modified_base 1: mod_base = OTHER; note = 2'-O-methyluridine-3'-phosphorothioate 5'-(E)-Vinylphosphonate
  modified_base 2: mod_base = OTHER; note = 2'-deoxy-2'-fluoroadenosine-3'-phosphorothioate
  modified_base 3: mod_base = OTHER; note = 2'-O-methylcytidine-3'-phosphate
  modified_base 4: mod_base = OTHER; note = 2'-O-methyluridine-3'-phosphate
  modified_base 5: mod_base = OTHER; note = 2'-O-methyladenosine-3'-phosphate
  modified_base 6: mod_base = OTHER; note = 2'-deoxy-2'-fluoroguanosine-3'-phosphate
  modified_base 7: mod_base = OTHER; note = 2'-O-methyluridine-3'-phosphate
  modified_base 8: mod_base = OTHER; note = 2'-O-methylcytidine-3'-phosphate
  modified_base 9: mod_base = OTHER; note = 2'-O-methyladenosine-3'-phosphate
  modified_base 10: mod_base = OTHER; note = 2'-O-methyluridine-3'-phosphate
  modified_base 11: mod_base = OTHER; note = 2'-O-methyluridine-3'-phosphate
  modified_base 12: mod_base = OTHER; note = 2'-O-methylguanosine-3'-phosphate
  modified_base 13: mod_base = OTHER; note = 2'-O-methylcytidine-3'-phosphate
  modified_base 14: mod_base = OTHER; note = 2'-deoxy-2'-fluoroguanosine-3'-phosphate
  modified_base 15: mod_base = OTHER; note = 2'-O-methylguanosine-3'-phosphate
  modified_base 16: mod_base = OTHER; note = 2'-deoxy-2'-fluoroadenosine-3'-phosphate
  modified_base 17: mod_base = OTHER; note = 2'-O-methyladenosine-3'-phosphate
  modified_base 18: mod_base = OTHER; note = 2'-O-methyladenosine-3'-phosphate
  modified_base 19: mod_base = OTHER; note = 2'-O-methyladenosine-3'-phosphate
  modified_base 20: mod_base = OTHER; note = 2'-O-methylguanosine-3'-phosphate
  modified_base 21: mod_base = OTHER; note = 2'-O-methyladenosine-3'-phosphorothioate
  modified_base 22: mod_base = OTHER; note = 2'-O-methyladenosine-3'-phosphorothioate
  modified_base 23: mod_base = OTHER; note = 2'-O-methylcytidine
tactagtcattgcggaaaagaac

SEQ ID NO: 13327 - RNA, 23 nt, synthetic construct
  source 1..23: mol_type = other RNA
  modified_base 1: mod_base = OTHER; note = 2'-O-methyluridine-3'-phosphorothioate 5'-(E)-Vinylphosphonate
  modified_base 2: mod_base = OTHER; note = 2'-deoxy-2'-fluoroguanosine-3'-phosphorothioate
  modified_base 3: mod_base = OTHER; note = 2'-O-methyluridine-3'-phosphate
  modified_base 4: mod_base = OTHER; note = 2'-O-methyluridine-3'-phosphate
  modified_base 5: mod_base = OTHER; note = 2'-O-methyluridine-3'-phosphate
  modified_base 6: mod_base = OTHER; note = 2'-deoxy-2'-fluoroguanosine-3'-phosphate
  modified_base 7: mod_base = OTHER; note = 2'-O-methyladenosine-3'-phosphate
  modified_base 8: mod_base = OTHER; note = 2'-O-methyladenosine-3'-phosphate
  modified_base 9: mod_base = OTHER; note = 2'-O-methyluridine-3'-phosphate
  modified_base 10: mod_base = OTHER; note = 2'-O-methyladenosine-3'-phosphate
  modified_base 11: mod_base = OTHER; note = 2'-O-methyladenosine-3'-phosphate
  modified_base 12: mod_base = OTHER; note = 2'-O-methyluridine-3'-phosphate
  modified_base 13: mod_base = OTHER; note = 2'-O-methylcytidine-3'-phosphate
  modified_base 14: mod_base = OTHER; note = 2'-deoxy-2'-fluorouridine-3'-phosphate
  modified_base 15: mod_base = OTHER; note = 2'-O-methyluridine-3'-phosphate
  modified_base 16: mod_base = OTHER; note = 2'-deoxy-2'-fluorocytidine-3'-phosphate
  modified_base 17: mod_base = OTHER; note = 2'-O-methyluridine-3'-phosphate
  modified_base 18: mod_base = OTHER; note = 2'-O-methylcytidine-3'-phosphate
  modified_base 19: mod_base = OTHER; note = 2'-O-methylcytidine-3'-phosphate
  modified_base 20: mod_base = OTHER; note = 2'-O-methyladenosine-3'-phosphate
  modified_base 21: mod_base = OTHER; note = 2'-O-methylguanosine-3'-phosphorothioate
  modified_base 22: mod_base = OTHER; note = 2'-O-methyluridine-3'-phosphorothioate
  modified_base 23: mod_base = OTHER; note = 2'-O-methylcytidine
tgtttgaataatcttctccagtc

SEQ ID NO: 13328 - RNA, 23 nt, synthetic construct
  source 1..23: mol_type = other RNA
  modified_base 1: mod_base = OTHER; note = 2'-O-methyluridine-3'-phosphorothioate 5'-(E)-Vinylphosphonate
  modified_base 2: mod_base = OTHER; note = 2'-deoxy-2'-fluoroadenosine-3'-phosphorothioate
  modified_base 3: mod_base = OTHER; note = 2'-O-methyladenosine-3'-phosphate
  modified_base 4: mod_base = OTHER; note = 2'-O-methylguanosine-3'-phosphate
  modified_base 5: mod_base = OTHER; note = 2'-O-methyluridine-3'-phosphate
  modified_base 6: mod_base = OTHER; note = 2'-deoxy-2'-fluorouridine-3'-phosphate
  modified_base 7: mod_base = OTHER; note = 2'-O-methyluridine-3'-phosphate
  modified_base 8: mod_base = OTHER; note = 2'-O-methylguanosine-3'-phosphate
  modified_base 9: mod_base = OTHER; note = 2'-O-methyladenosine-3'-phosphate
  modified_base 10: mod_base = OTHER; note = 2'-O-methyladenosine-3'-phosphate
  modified_base 11: mod_base = OTHER; note = 2'-O-methyluridine-3'-phosphate
  modified_base 12: mod_base = OTHER; note = 2'-O-methyladenosine-3'-phosphate
  modified_base 13: mod_base = OTHER; note = 2'-O-methyladenosine-3'-phosphate
  modified_base 14: mod_base = OTHER; note = 2'-deoxy-2'-fluorouridine-3'-phosphate
  modified_base 15: mod_base = OTHER; note = 2'-O-methylcytidine-3'-phosphate
  modified_base 16: mod_base = OTHER; note = 2'-deoxy-2'-fluorouridine-3'-phosphate
  modified_base 17: mod_base = OTHER; note = 2'-O-methyluridine-3'-phosphate
  modified_base 18: mod_base = OTHER; note = 2'-O-methylcytidine-3'-phosphate
  modified_base 19: mod_base = OTHER; note = 2'-O-methyluridine-3'-phosphate
  modified_base 20: mod_base = OTHER; note = 2'-O-methylcytidine-3'-phosphate
  modified_base 21: mod_base = OTHER; note = 2'-O-methylcytidine-3'-phosphorothioate
  modified_base 22: mod_base = OTHER; note = 2'-O-methyladenosine-3'-phosphorothioate
  modified_base 23: mod_base = OTHER; note = 2'-O-methylguanosine
taagtttgaataatcttctccag

SEQ ID NO: 13329 - RNA, 23 nt, synthetic construct
  source 1..23: mol_type = other RNA
  modified_base 1: mod_base = OTHER; note = 2'-O-methyluridine-3'-phosphorothioate 5'-(E)-Vinylphosphonate
  modified_base 2: mod_base = OTHER; note = 2'-deoxy-2'-fluoroadenosine-3'-phosphorothioate
  modified_base 3: mod_base = OTHER; note = 2'-O-methyladenosine-3'-phosphate
  modified_base 4: mod_base = OTHER; note = 2'-O-methylcytidine-3'-phosphate
  modified_base 5: mod_base = OTHER; note = 2'-O-methylcytidine-3'-phosphate
  modified_base 6: mod_base = OTHER; note = 2'-deoxy-2'-fluorouridine-3'-phosphate
  modified_base 7: mod_base = OTHER; note = 2'-O-methylguanosine-3'-phosphate
  modified_base 8: mod_base = OTHER; note = 2'-O-methyladenosine-3'-phosphate
  modified_base 9: mod_base = OTHER; note = 2'-O-methyladenosine-3'-phosphate
  modified_base 10: mod_base = OTHER; note = 2'-O-methyladenosine-3'-phosphate
  modified_base 11: mod_base = OTHER; note = 2'-O-methylcytidine-3'-phosphate
  modified_base 12: mod_base = OTHER; note = 2'-O-methyladenosine-3'-phosphate
  modified_base 13: mod_base = OTHER; note = 2'-O-methylcytidine-3'-phosphate
  modified_base 14: mod_base = OTHER; note = 2'-deoxy-2'-fluoroadenosine-3'-phosphate
  modified_base 15: mod_base = OTHER; note = 2'-O-methylguanosine-3'-phosphate
  modified_base 16: mod_base = OTHER; note = 2'-deoxy-2'-fluoroadenosine-3'-phosphate
  modified_base 17: mod_base = OTHER; note = 2'-O-methyluridine-3'-phosphate
  modified_base 18: mod_base = OTHER; note = 2'-O-methylcytidine-3'-phosphate
  modified_base 19: mod_base = OTHER; note = 2'-O-methyladenosine-3'-phosphate
  modified_base 20: mod_base = OTHER; note = 2'-O-methyladenosine-3'-phosphate
  modified_base 21: mod_base = OTHER; note = 2'-O-methylguanosine-3'-phosphorothioate
  modified_base 22: mod_base = OTHER; note = 2'-O-methyluridine-3'-phosphorothioate
  modified_base 23: mod_base = OTHER; note = 2'-O-methyluridine
taacctgaaacacagatcaagtt

SEQ ID NO: 13330 - RNA, 23 nt, synthetic construct
  source 1..23: mol_type = other RNA
  modified_base 1: mod_base = OTHER; note = 2'-O-methyluridine-3'-phosphorothioate 5'-(E)-Vinylphosphonate
  modified_base 2: mod_base = OTHER; note = 2'-deoxy-2'-fluorouridine-3'-phosphorothioate
  modified_base 3: mod_base = OTHER; note = 2'-O-methyluridine-3'-phosphate
  modified_base 4: mod_base = OTHER; note = 2'-O-methyladenosine-3'-phosphate
  modified_base 5: mod_base = OTHER; note = 2'-O-methyladenosine-3'-phosphate
  modified_base 6: mod_base = OTHER; note = 2'-deoxy-2'-fluoroadenosine-3'-phosphate
  modified_base 7: mod_base = OTHER; note = 2'-O-methyladenosine-3'-phosphate
  modified_base 8: mod_base = OTHER; note = 2'-O-methyladenosine-3'-phosphate
  modified_base 9: mod_base = OTHER; note = 2'-O-methylcytidine-3'-phosphate
  modified_base 10: mod_base = OTHER; note = 2'-O-methylcytidine-3'-phosphate
  modified_base 11: mod_base = OTHER; note = 2'-O-methyluridine-3'-phosphate
  modified_base 12: mod_base = OTHER; note = 2'-O-methylguanosine-3'-phosphate
  modified_base 13: mod_base = OTHER; note = 2'-O-methyladenosine-3'-phosphate
  modified_base 14: mod_base = OTHER; note = 2'-deoxy-2'-fluoroadenosine-3'-phosphate
  modified_base 15: mod_base = OTHER; note = 2'-O-methyladenosine-3'-phosphate
  modified_base 16: mod_base = OTHER; note = 2'-deoxy-2'-fluorocytidine-3'-phosphate
  modified_base 17: mod_base = OTHER; note = 2'-O-methyladenosine-3'-phosphate
  modified_base 18: mod_base = OTHER; note = 2'-O-methylcytidine-3'-phosphate
  modified_base 19: mod_base = OTHER; note = 2'-O-methyladenosine-3'-phosphate
  modified_base 20: mod_base = OTHER; note = 2'-O-methylguanosine-3'-phosphate
  modified_base 21: mod_base = OTHER; note = 2'-O-methyladenosine-3'-phosphorothioate
  modified_base 22: mod_base = OTHER; note = 2'-O-methyluridine-3'-phosphorothioate
  modified_base 23: mod_base = OTHER; note = 2'-O-methylcytidine
tttaaaaacctgaaacacagatc

SEQ ID NO: 13331 - RNA, 23 nt, synthetic construct
  source 1..23: mol_type = other RNA
  modified_base 1: mod_base = OTHER; note = 2'-O-methyluridine-3'-phosphorothioate 5'-(E)-Vinylphosphonate
  modified_base 2: mod_base = OTHER; note = 2'-deoxy-2'-fluorouridine-3'-phosphorothioate
  modified_base 3: mod_base = OTHER; note = 2'-O-methyluridine-3'-phosphate
  modified_base 4: mod_base = OTHER; note = 2'-O-methyladenosine-3'-phosphate
  modified_base 5: mod_base = OTHER; note = 2'-O-methylguanosine-3'-phosphate
  modified_base 6: mod_base = OTHER; note = 2'-deoxy-2'-fluoroguanosine-3'-phosphate
  modified_base 7: mod_base = OTHER; note = 2'-O-methyladenosine-3'-phosphate
  modified_base 8: mod_base = OTHER; note = 2'-O-methylcytidine-3'-phosphate
  modified_base 9: mod_base = OTHER; note = 2'-O-methyladenosine-3'-phosphate
  modified_base 10: mod_base = OTHER; note = 2'-O-methyluridine-3'-phosphate
  modified_base 11: mod_base = OTHER; note = 2'-O-methyluridine-3'-phosphate
  modified_base 12: mod_base = OTHER; note = 2'-O-methyluridine-3'-phosphate
  modified_base 13: mod_base = OTHER; note = 2'-O-methyladenosine-3'-phosphate
  modified_base 14: mod_base = OTHER; note = 2'-deoxy-2'-fluoroadenosine-3'-phosphate
  modified_base 15: mod_base = OTHER; note = 2'-O-methyladenosine-3'-phosphate
  modified_base 16: mod_base = OTHER; note = 2'-deoxy-2'-fluoroadenosine-3'-phosphate
  modified_base 17: mod_base = OTHER; note = 2'-O-methyladenosine-3'-phosphate
  modified_base 18: mod_base = OTHER; note = 2'-O-methylcytidine-3'-phosphate
  modified_base 19: mod_base = OTHER; note = 2'-O-methylcytidine-3'-phosphate
  modified_base 20: mod_base = OTHER; note = 2'-O-methyluridine-3'-phosphate
  modified_base 21: mod_base = OTHER; note = 2'-O-methylguanosine-3'-phosphorothioate
  modified_base 22: mod_base = OTHER; note = 2'-O-methyladenosine-3'-phosphorothioate
  modified_base 23: mod_base = OTHER; note = 2'-O-methyladenosine
tttaggacatttaaaaacctgaa

SEQ ID NO: 13332 - RNA, 23 nt, synthetic construct
  source 1..23: mol_type = other RNA
  modified_base 1: mod_base = OTHER; note = 2'-O-methyluridine-3'-phosphorothioate 5'-(E)-Vinylphosphonate
  modified_base 2: mod_base = OTHER; note = 2'-deoxy-2'-fluoroguanosine-3'-phosphorothioate
  modified_base 3: mod_base = OTHER; note = 2'-O-methyluridine-3'-phosphate
  modified_base 4: mod_base = OTHER; note = 2'-O-methyladenosine-3'-phosphate
  modified_base 5: mod_base = OTHER; note = 2'-O-methyluridine-3'-phosphate
  modified_base 6: mod_base = OTHER; note = 2'-deoxy-2'-fluorouridine-3'-phosphate
  modified_base 7: mod_base = OTHER; note = 2'-O-methyladenosine-3'-phosphate
  modified_base 8: mod_base = OTHER; note = 2'-O-methylguanosine-3'-phosphate
  modified_base 9: mod_base = OTHER; note = 2'-O-methyluridine-3'-phosphate
  modified_base 10: mod_base = OTHER; note = 2'-O-methyladenosine-3'-phosphate
  modified_base 11: mod_base = OTHER; note = 2'-O-methylcytidine-3'-phosphate
  modified_base 12: mod_base = OTHER; note = 2'-O-methyluridine-3'-phosphate
  modified_base 13: mod_base = OTHER; note = 2'-O-methyluridine-3'-phosphate
  modified_base 14: mod_base = OTHER; note = 2'-deoxy-2'-fluorouridine-3'-phosphate
  modified_base 15: mod_base = OTHER; note = 2'-O-methylguanosine-3'-phosphate
  modified_base 16: mod_base = OTHER; note = 2'-deoxy-2'-fluoroadenosine-3'-phosphate
  modified_base 17: mod_base = OTHER; note = 2'-O-methyladenosine-3'-phosphate
  modified_base 18: mod_base = OTHER; note = 2'-O-methyladenosine-3'-phosphate
  modified_base 19: mod_base = OTHER; note = 2'-O-methylguanosine-3'-phosphate
  modified_base 20: mod_base = OTHER; note = 2'-O-methyluridine-3'-phosphate
  modified_base 21: mod_base = OTHER; note = 2'-O-methylcytidine-3'-phosphorothioate
  modified_base 22: mod_base = OTHER; note = 2'-O-methyladenosine-3'-phosphorothioate
  modified_base 23: mod_base = OTHER; note = 2'-O-methyladenosine
tgtattagtactttgaaagtcaa

SEQ ID NO: 13333 - RNA, 23 nt, synthetic construct
  source 1..23: mol_type = other RNA
  modified_base 1: mod_base = OTHER; note = 2'-O-methyluridine-3'-phosphorothioate 5'-(E)-Vinylphosphonate
  modified_base 2: mod_base = OTHER; note = 2'-deoxy-2'-fluoroadenosine-3'-phosphorothioate
  modified_base 3: mod_base = OTHER; note = 2'-O-methyladenosine-3'-phosphate
  modified_base 4: mod_base = OTHER; note = 2'-O-methylguanosine-3'-phosphate
  modified_base 5: mod_base = OTHER; note = 2'-O-methyluridine-3'-phosphate
  modified_base 6: mod_base = OTHER; note = 2'-deoxy-2'-fluorocytidine-3'-phosphate
  modified_base 7: mod_base = OTHER; note = 2'-O-methyladenosine-3'-phosphate
  modified_base 8: mod_base = OTHER; note = 2'-O-methyladenosine-3'-phosphate
  modified_base 9: mod_base = OTHER; note = 2'-O-methyluridine-3'-phosphate
  modified_base 10: mod_base = OTHER; note = 2'-O-methylcytidine-3'-phosphate
  modified_base 11: mod_base = OTHER; note = 2'-O-methylcytidine-3'-phosphate
  modified_base 12: mod_base = OTHER; note = 2'-O-methyladenosine-3'-phosphate
  modified_base 13: mod_base = OTHER; note = 2'-O-methyladenosine-3'-phosphate
  modified_base 14: mod_base = OTHER; note = 2'-deoxy-2'-fluoroadenosine-3'-phosphate
  modified_base 15: mod_base = OTHER; note = 2'-O-methyladenosine-3'-phosphate
  modified_base 16: mod_base = OTHER; note = 2'-deoxy-2'-fluorouridine-3'-phosphate
  modified_base 17: mod_base = OTHER; note = 2'-O-methyluridine-3'-phosphate
  modified_base 18: mod_base = OTHER; note = 2'-O-methylcytidine-3'-phosphate
  modified_base 19: mod_base = OTHER; note = 2'-O-methylcytidine-3'-phosphate
  modified_base 20: mod_base = OTHER; note = 2'-O-methyluridine-3'-phosphate
  modified_base 21: mod_base = OTHER; note = 2'-O-methyluridine-3'-phosphorothioate
  modified_base 22: mod_base = OTHER; note = 2'-O-methyluridine-3'-phosphorothioate
  modified_base 23: mod_base = OTHER; note = 2'-O-methyluridine
taagtcaatccaaaattcctttt

SEQ ID NO: 13334 - RNA, 23 nt, synthetic construct
  source 1..23: mol_type = other RNA
  modified_base 1: mod_base = OTHER; note = 2'-O-methyluridine-3'-phosphorothioate 5'-(E)-Vinylphosphonate
  modified_base 2: mod_base = OTHER; note = 2'-deoxy-2'-fluoroadenosine-3'-phosphorothioate
  modified_base 3: mod_base = OTHER; note = 2'-O-methyluridine-3'-phosphate
  modified_base 4: mod_base = OTHER; note = 2'-O-methyluridine-3'-phosphate
  modified_base 5: mod_base = OTHER; note = 2'-O-methyladenosine-3'-phosphate
  modified_base 6: mod_base = OTHER; note = 2'-deoxy-2'-fluoroguanosine-3'-phosphate
  modified_base 7: mod_base = OTHER; note = 2'-O-methyluridine-3'-phosphate
  modified_base 8: mod_base = OTHER; note = 2'-O-methyladenosine-3'-phosphate
  modified_base 9: mod_base = OTHER; note = 2'-O-methylcytidine-3'-phosphate
  modified_base 10: mod_base = OTHER; note = 2'-O-methyluridine-3'-phosphate
  modified_base 11: mod_base = OTHER; note = 2'-O-methyluridine-3'-phosphate
  modified_base 12: mod_base = OTHER; note = 2'-O-methyluridine-3'-phosphate
  modified_base 13: mod_base = OTHER; note = 2'-O-methylguanosine-3'-phosphate
  modified_base 14: mod_base = OTHER; note = 2'-deoxy-2'-fluoroadenosine-3'-phosphate
  modified_base 15: mod_base = OTHER; note = 2'-O-methyladenosine-3'-phosphate
  modified_base 16: mod_base = OTHER; note = 2'-deoxy-2'-fluoroadenosine-3'-phosphate
  modified_base 17: mod_base = OTHER; note = 2'-O-methylguanosine-3'-phosphate
  modified_base 18: mod_base = OTHER; note = 2'-O-methyluridine-3'-phosphate
  modified_base 19: mod_base = OTHER; note = 2'-O-methylcytidine-3'-phosphate
  modified_base 20: mod_base = OTHER; note = 2'-O-methyladenosine-3'-phosphate
  modified_base 21: mod_base = OTHER; note = 2'-O-methyladenosine-3'-phosphorothioate
  modified_base 22: mod_base = OTHER; note = 2'-O-methyluridine-3'-phosphorothioate
  modified_base 23: mod_base = OTHER; note = 2'-O-methylcytidine
tattagtactttgaaagtcaatc

SEQ ID NO: 13335 - RNA, 23 nt, synthetic construct
  source 1..23: mol_type = other RNA
  modified_base 1: mod_base = OTHER; note = 2'-O-methyluridine-3'-phosphorothioate 5'-(E)-Vinylphosphonate
  modified_base 2: mod_base = OTHER; note = 2'-deoxy-2'-fluoroguanosine-3'-phosphorothioate
  modified_base 3: mod_base = OTHER; note = 2'-O-methyluridine-3'-phosphate
  modified_base 4: mod_base = OTHER; note = 2'-O-methyladenosine-3'-phosphate
  modified_base 5: mod_base = OTHER; note = 2'-O-methyluridine-3'-phosphate
  modified_base 6: mod_base = OTHER; note = 2'-deoxy-2'-fluoroadenosine-3'-phosphate
  modified_base 7: mod_base = OTHER; note = 2'-O-methyladenosine-3'-phosphate
  modified_base 8: mod_base = OTHER; note = 2'-O-methylguanosine-3'-phosphate
  modified_base 9: mod_base = OTHER; note = 2'-O-methyladenosine-3'-phosphate
  modified_base 10: mod_base = OTHER; note = 2'-O-methyladenosine-3'-phosphate
  modified_base 11: mod_base = OTHER; note = 2'-O-methylguanosine-3'-phosphate
  modified_base 12: mod_base = OTHER; note = 2'-O-methyladenosine-3'-phosphate
  modified_base 13: mod_base = OTHER; note = 2'-O-methylguanosine-3'-phosphate
  modified_base 14: mod_base = OTHER; note = 2'-deoxy-2'-fluorouridine-3'-phosphate
  modified_base 15: mod_base = OTHER; note = 2'-O-methylcytidine-3'-phosphate
  modified_base 16: mod_base = OTHER; note = 2'-deoxy-2'-fluoroadenosine-3'-phosphate
  modified_base 17: mod_base = OTHER; note = 2'-O-methylcytidine-3'-phosphate
  modified_base 18: mod_base = OTHER; note = 2'-O-methylguanosine-3'-phosphate
  modified_base 19: mod_base = OTHER; note = 2'-O-methylcytidine-3'-phosphate
  modified_base 20: mod_base = OTHER; note = 2'-O-methyluridine-3'-phosphate
  modified_base 21: mod_base = OTHER; note = 2'-O-methyladenosine-3'-phosphorothioate
  modified_base 22: mod_base = OTHER; note = 2'-O-methylcytidine-3'-phosphorothioate
  modified_base 23: mod_base = OTHER; note = 2'-O-methylcytidine
tgtataagaagagtcacgctacc

SEQ ID NO: 13336 - RNA, 23 nt, synthetic construct
  source 1..23: mol_type = other RNA
  modified_base 1: mod_base = OTHER; note = 2'-O-methyluridine-3'-phosphorothioate 5'-(E)-Vinylphosphonate
  modified_base 2: mod_base = OTHER; note = 2'-deoxy-2'-fluorouridine-3'-phosphorothioate
  modified_base 3: mod_base = OTHER; note = 2'-O-methyluridine-3'-phosphate
  modified_base 4: mod_base = OTHER; note = 2'-O-methyladenosine-3'-phosphate
  modified_base 5: mod_base = OTHER; note = 2'-O-methylguanosine-3'-phosphate
  modified_base 6: mod_base = OTHER; note = 2'-deoxy-2'-fluoroguanosine-3'-phosphate
  modified_base 7: mod_base = OTHER; note = 2'-O-methyluridine-3'-phosphate
  modified_base 8: mod_base = OTHER; note = 2'-O-methyladenosine-3'-phosphate
  modified_base 9: mod_base = OTHER; note = 2'-O-methyluridine-3'-phosphate
  modified_base 10: mod_base = OTHER; note = 2'-O-methyladenosine-3'-phosphate
  modified_base 11: mod_base = OTHER; note = 2'-O-methyladenosine-3'-phosphate
  modified_base 12: mod_base = OTHER; note = 2'-O-methylguanosine-3'-phosphate
  modified_base 13: mod_base = OTHER; note = 2'-O-methyladenosine-3'-phosphate
  modified_base 14: mod_base = OTHER; note = 2'-deoxy-2'-fluoroadenosine-3'-phosphate
  modified_base 15: mod_base = OTHER; note = 2'-O-methylguanosine-3'-phosphate
  modified_base 16: mod_base = OTHER; note = 2'-deoxy-2'-fluoroadenosine-3'-phosphate
  modified_base 17: mod_base = OTHER; note = 2'-O-methylguanosine-3'-phosphate
  modified_base 18: mod_base = OTHER; note = 2'-O-methyluridine-3'-phosphate
  modified_base 19: mod_base = OTHER; note = 2'-O-methylcytidine-3'-phosphate
  modified_base 20: mod_base = OTHER; note = 2'-O-methyladenosine-3'-phosphate
  modified_base 21: mod_base = OTHER; note = 2'-O-methylcytidine-3'-phosphorothioate
  modified_base 22: mod_base = OTHER; note = 2'-O-methylguanosine-3'-phosphorothioate
  modified_base 23: mod_base = OTHER; note = 2'-O-methylcytidine
tttaggtataagaagagtcacgc

SEQ ID NO: 13337 - RNA, 23 nt, synthetic construct
  source 1..23: mol_type = other RNA
  modified_base 1: mod_base = OTHER; note = 2'-O-methyluridine-3'-phosphorothioate 5'-(E)-Vinylphosphonate
  modified_base 2: mod_base = OTHER; note = 2'-deoxy-2'-fluoroadenosine-3'-phosphorothioate
  modified_base 3: mod_base = OTHER; note = 2'-O-methylcytidine-3'-phosphate
  modified_base 4: mod_base = OTHER; note = 2'-O-methyladenosine-3'-phosphate
  modified_base 5: mod_base = OTHER; note = 2'-O-methyluridine-3'-phosphate
  modified_base 6: mod_base = OTHER; note = 2'-deoxy-2'-fluorouridine-3'-phosphate
  modified_base 7: mod_base = OTHER; note = 2'-O-methyluridine-3'-phosphate
  modified_base 8: mod_base = OTHER; note = 2'-O-methylguanosine-3'-phosphate
  modified_base 9: mod_base = OTHER; note = 2'-O-methyluridine-3'-phosphate
  modified_base 10: mod_base = OTHER; note = 2'-O-methyladenosine-3'-phosphate
  modified_base 11: mod_base = OTHER; note = 2'-O-methyladenosine-3'-phosphate
  modified_base 12: mod_base = OTHER; note = 2'-O-methyluridine-3'-phosphate
  modified_base 13: mod_base = OTHER; note = 2'-O-methyladenosine-3'-phosphate
  modified_base 14: mod_base = OTHER; note = 2'-deoxy-2'-fluorouridine-3'-phosphate
  modified_base 15: mod_base = OTHER; note = 2'-O-methylguanosine-3'-phosphate
  modified_base 16: mod_base = OTHER; note = 2'-deoxy-2'-fluorouridine-3'-phosphate
  modified_base 17: mod_base = OTHER; note = 2'-O-methyluridine-3'-phosphate
  modified_base 18: mod_base = OTHER; note = 2'-O-methylcytidine-3'-phosphate
  modified_base 19: mod_base = OTHER; note = 2'-O-methyluridine-3'-phosphate
  modified_base 20: mod_base = OTHER; note = 2'-O-methyluridine-3'-phosphate
  modified_base 21: mod_base = OTHER; note = 2'-O-methyladenosine-3'-phosphorothioate
  modified_base 22: mod_base = OTHER; note = 2'-O-methylguanosine-3'-phosphorothioate
  modified_base 23: mod_base = OTHER; note = 2'-O-methylguanosine
tacatttgtaatatgttcttagg

SEQ ID NO: 13338 - RNA, 23 nt, synthetic construct
  source 1..23: mol_type = other RNA
  modified_base 1: mod_base = OTHER; note = 2'-O-methyluridine-3'-phosphorothioate 5'-(E)-Vinylphosphonate
  modified_base 2: mod_base = OTHER; note = 2'-deoxy-2'-fluoroadenosine-3'-phosphorothioate
  modified_base 3: mod_base = OTHER; note = 2'-O-methylguanosine-3'-phosphate
  modified_base 4: mod_base = OTHER; note = 2'-O-methyladenosine-3'-phosphate
  modified_base 5: mod_base = OTHER; note = 2'-O-methylguanosine-3'-phosphate
  modified_base 6: mod_base = OTHER; note = 2'-deoxy-2'-fluorouridine-3'-phosphate
  modified_base 7: mod_base = OTHER; note = 2'-O-methyluridine-3'-phosphate
  modified_base 8: mod_base = OTHER; note = 2'-O-methylcytidine-3'-phosphate
  modified_base 9: mod_base = OTHER; note = 2'-O-methyladenosine-3'-phosphate
  modified_base 10: mod_base = OTHER; note = 2'-O-methyladenosine-3'-phosphate
  modified_base 11: mod_base = OTHER; note = 2'-O-methylguanosine-3'-phosphate
  modified_base 12: mod_base = OTHER; note = 2'-O-methylguanosine-3'-phosphate
  modified_base 13: mod_base = OTHER; note = 2'-O-methylcytidine-3'-phosphate
  modified_base 14: mod_base = OTHER; note = 2'-deoxy-2'-fluoroadenosine-3'-phosphate
  modified_base 15: mod_base = OTHER; note = 2'-O-methyluridine-3'-phosphate
  modified_base 16: mod_base = OTHER; note = 2'-deoxy-2'-fluoroguanosine-3'-phosphate
  modified_base 17: mod_base = OTHER; note = 2'-O-methyluridine-3'-phosphate
  modified_base 18: mod_base = OTHER; note = 2'-O-methyluridine-3'-phosphate
  modified_base 19: mod_base = OTHER; note = 2'-O-methyluridine-3'-phosphate
  modified_base 20: mod_base = OTHER; note = 2'-O-methyluridine-3'-phosphate
  modified_base 21: mod_base = OTHER; note = 2'-O-methylguanosine-3'-phosphorothioate
  modified_base 22: mod_base = OTHER; note = 2'-O-methylcytidine-3'-phosphorothioate
  modified_base 23: mod_base = OTHER; note = 2'-O-methyladenosine
tagagttcaaggcatgttttgca

SEQ ID NO: 13339 - RNA, 23 nt, synthetic construct
  source 1..23: mol_type = other RNA
  modified_base 1: mod_base = OTHER; note = 2'-O-methyluridine-3'-phosphorothioate 5'-(E)-Vinylphosphonate
  modified_base 2: mod_base = OTHER; note = 2'-deoxy-2'-fluoroadenosine-3'-phosphorothioate
  modified_base 3: mod_base = OTHER; note = 2'-O-methyladenosine-3'-phosphate
  modified_base 4: mod_base = OTHER; note = 2'-O-methylguanosine-3'-phosphate
  modified_base 5: mod_base = OTHER; note = 2'-O-methyladenosine-3'-phosphate
  modified_base 6: mod_base = OTHER; note = 2'-deoxy-2'-fluoroguanosine-3'-phosphate
  modified_base 7: mod_base = OTHER; note = 2'-O-methyluridine-3'-phosphate
  modified_base 8: mod_base = OTHER; note = 2'-O-methyluridine-3'-phosphate
  modified_base 9: mod_base = OTHER; note = 2'-O-methylcytidine-3'-phosphate
  modified_base 10: mod_base = OTHER; note = 2'-O-methyladenosine-3'-phosphate
  modified_base 11: mod_base = OTHER; note = 2'-O-methyladenosine-3'-phosphate
  modified_base 12: mod_base = OTHER; note = 2'-O-methylguanosine-3'-phosphate
  modified_base 13: mod_base = OTHER; note = 2'-O-methylguanosine-3'-phosphate
  modified_base 14: mod_base = OTHER; note = 2'-deoxy-2'-fluorocytidine-3'-phosphate
  modified_base 15: mod_base = OTHER; note = 2'-O-methyladenosine-3'-phosphate
  modified_base 16: mod_base = OTHER; note = 2'-deoxy-2'-fluorouridine-3'-phosphate
  modified_base 17: mod_base = OTHER; note = 2'-O-methylguanosine-3'-phosphate
  modified_base 18: mod_base = OTHER; note = 2'-O-methyluridine-3'-phosphate
  modified_base 19: mod_base = OTHER; note = 2'-O-methyluridine-3'-phosphate
  modified_base 20: mod_base = OTHER; note = 2'-O-methyluridine-3'-phosphate
  modified_base 21: mod_base = OTHER; note = 2'-O-methyluridine-3'-phosphorothioate
  modified_base 22: mod_base = OTHER; note = 2'-O-methylguanosine-3'-phosphorothioate
  modified_base 23: mod_base = OTHER; note = 2'-O-methylcytidine
taagagttcaaggcatgttttgc

SEQ ID NO: 13340 - RNA, 23 nt, synthetic construct
  source 1..23: mol_type = other RNA
  modified_base 1: mod_base = OTHER; note = 2'-O-methyluridine-3'-phosphorothioate 5'-(E)-Vinylphosphonate
  modified_base 2: mod_base = OTHER; note = 2'-deoxy-2'-fluorouridine-3'-phosphorothioate
  modified_base 3: mod_base = OTHER; note = 2'-O-methyladenosine-3'-phosphate
  modified_base 4: mod_base = OTHER; note = 2'-O-methylguanosine-3'-phosphate
  modified_base 5: mod_base = OTHER; note = 2'-O-methyluridine-3'-phosphate
  modified_base 6: mod_base = OTHER; note = 2'-deoxy-2'-fluorouridine-3'-phosphate
  modified_base 7: mod_base = OTHER; note = 2'-O-methylcytidine-3'-phosphate
  modified_base 8: mod_base = OTHER; note = 2'-O-methyladenosine-3'-phosphate
  modified_base 9: mod_base = OTHER; note = 2'-O-methyladenosine-3'-phosphate
  modified_base 10: mod_base = OTHER; note = 2'-O-methylguanosine-3'-phosphate
  modified_base 11: mod_base = OTHER; note = 2'-O-methyladenosine-3'-phosphate
  modified_base 12: mod_base = OTHER; note = 2'-O-methylguanosine-3'-phosphate
  modified_base 13: mod_base = OTHER; note = 2'-O-methyluridine-3'-phosphate
  modified_base 14: mod_base = OTHER; note = 2'-deoxy-2'-fluorouridine-3'-phosphate
  modified_base 15: mod_base = OTHER; note = 2'-O-methylcytidine-3'-phosphate
  modified_base 16: mod_base = OTHER; note = 2'-deoxy-2'-fluoroadenosine-3'-phosphate
  modified_base 17: mod_base = OTHER; note = 2'-O-methyladenosine-3'-phosphate
  modified_base 18: mod_base = OTHER; note = 2'-O-methylguanosine-3'-phosphate
  modified_base 19: mod_base = OTHER; note = 2'-O-methylguanosine-3'-phosphate
  modified_base 20: mod_base = OTHER; note = 2'-O-methylcytidine-3'-phosphate
  modified_base 21: mod_base = OTHER; note = 2'-O-methyladenosine-3'-phosphorothioate
  modified_base 22: mod_base = OTHER; note = 2'-O-methyluridine-3'-phosphorothioate
  modified_base 23: mod_base = OTHER; note = 2'-O-methylguanosine
ttagttcaagagttcaaggcatg

SEQ ID NO: 13341 - RNA, 23 nt, synthetic construct
  source 1..23: mol_type = other RNA
  modified_base 1: mod_base = OTHER; note = 2'-O-methyluridine-3'-phosphorothioate 5'-(E)-Vinylphosphonate
  modified_base 2: mod_base = OTHER; note = 2'-deoxy-2'-fluorouridine-3'-phosphorothioate
  modified_base 3: mod_base = OTHER; note = 2'-O-methyluridine-3'-phosphate
  modified_base 4: mod_base = OTHER; note = 2'-O-methyluridine-3'-phosphate
  modified_base 5: mod_base = OTHER; note = 2'-O-methyluridine-3'-phosphate
  modified_base 6: mod_base = OTHER; note = 2'-deoxy-2'-fluorocytidine-3'-phosphate
  modified_base 7: mod_base = OTHER; note = 2'-O-methyladenosine-3'-phosphate
  modified_base 8: mod_base = OTHER; note = 2'-O-methylcytidine-3'-phosphate
  modified_base 9: mod_base = OTHER; note = 2'-O-methyladenosine-3'-phosphate
  modified_base 10: mod_base = OTHER; note = 2'-O-methylguanosine-3'-phosphate
  modified_base 11: mod_base = OTHER; note = 2'-O-methyluridine-3'-phosphate
  modified_base 12: mod_base = OTHER; note = 2'-O-methyladenosine-3'-phosphate
  modified_base 13: mod_base = OTHER; note = 2'-O-methylguanosine-3'-phosphate
  modified_base 14: mod_base = OTHER; note = 2'-deoxy-2'-fluorouridine-3'-phosphate
  modified_base 15: mod_base = OTHER; note = 2'-O-methyluridine-3'-phosphate
  modified_base 16: mod_base = OTHER; note = 2'-deoxy-2'-fluorocytidine-3'-phosphate
  modified_base 17: mod_base = OTHER; note = 2'-O-methyladenosine-3'-phosphate
  modified_base 18: mod_base = OTHER; note = 2'-O-methyladenosine-3'-phosphate
  modified_base 19: mod_base = OTHER; note = 2'-O-methylguanosine-3'-phosphate
  modified_base 20: mod_base = OTHER; note = 2'-O-methyladenosine-3'-phosphate
  modified_base 21: mod_base = OTHER; note = 2'-O-methylguanosine-3'-phosphorothioate
  modified_base 22: mod_base = OTHER; note = 2'-O-methyluridine-3'-phosphorothioate
  modified_base 23: mod_base = OTHER; note = 2'-O-methyluridine
tttttcacagtagttcaagagtt

SEQ ID NO: 13342 - RNA, 23 nt, synthetic construct
  source 1..23: mol_type = other RNA
  modified_base 1: mod_base = OTHER; note = 2'-O-methyluridine-3'-phosphorothioate 5'-(E)-Vinylphosphonate
  modified_base 2: mod_base = OTHER; note = 2'-deoxy-2'-fluorouridine-3'-phosphorothioate
  modified_base 3: mod_base = OTHER; note = 2'-O-methyluridine-3'-phosphate
  modified_base 4: mod_base = OTHER; note = 2'-O-methylcytidine-3'-phosphate
  modified_base 5: mod_base = OTHER; note = 2'-O-methyluridine-3'-phosphate
  modified_base 6: mod_base = OTHER; note = 2'-deoxy-2'-fluorouridine-3'-phosphate
  modified_base 7: mod_base = OTHER; note = 2'-O-methyluridine-3'-phosphate
  modified_base 8: mod_base = OTHER; note = 2'-O-methyluridine-3'-phosphate
  modified_base 9: mod_base = OTHER; note = 2'-O-methylcytidine-3'-phosphate
  modified_base 10: mod_base = OTHER; note = 2'-O-methyladenosine-3'-phosphate
  modified_base 11: mod_base = OTHER; note = 2'-O-methylcytidine-3'-phosphate
  modified_base 12: mod_base = OTHER; note = 2'-O-methyladenosine-3'-phosphate
  modified_base 13: mod_base = OTHER; note = 2'-O-methylguanosine-3'-phosphate
  modified_base 14: mod_base = OTHER; note = 2'-deoxy-2'-fluorouridine-3'-phosphate
  modified_base 15: mod_base = OTHER; note = 2'-O-methyladenosine-3'-phosphate
  modified_base 16: mod_base = OTHER; note = 2'-deoxy-2'-fluoroguanosine-3'-phosphate
  modified_base 17: mod_base = OTHER; note = 2'-O-methyluridine-3'-phosphate
  modified_base 18: mod_base = OTHER; note = 2'-O-methyluridine-3'-phosphate
  modified_base 19: mod_base = OTHER; note = 2'-O-methylcytidine-3'-phosphate
  modified_base 20: mod_base = OTHER; note = 2'-O-methyladenosine-3'-phosphate
  modified_base 21: mod_base = OTHER; note = 2'-O-methyladenosine-3'-phosphorothioate
  modified_base 22: mod_base = OTHER; note = 2'-O-methylguanosine-3'-phosphorothioate
  modified_base 23: mod_base = OTHER; note = 2'-O-methyladenosine
tttcttttcacagtagttcaaga

SEQ ID NO: 13343 - RNA, 23 nt, synthetic construct
  source 1..23: mol_type = other RNA
  modified_base 1: mod_base = OTHER; note = 2'-O-methyluridine-3'-phosphorothioate 5'-(E)-Vinylphosphonate
  modified_base 2: mod_base = OTHER; note = 2'-deoxy-2'-fluoroguanosine-3'-phosphorothioate
  modified_base 3: mod_base = OTHER; note = 2'-O-methyladenosine-3'-phosphate
  modified_base 4: mod_base = OTHER; note = 2'-O-methyluridine-3'-phosphate
  modified_base 5: mod_base = OTHER; note = 2'-O-methyluridine-3'-phosphate
  modified_base 6: mod_base = OTHER; note = 2'-deoxy-2'-fluorocytidine-3'-phosphate
  modified_base 7: mod_base = OTHER; note = 2'-O-methyluridine-3'-phosphate
  modified_base 8: mod_base = OTHER; note = 2'-O-methyluridine-3'-phosphate
  modified_base 9: mod_base = OTHER; note = 2'-O-methyluridine-3'-phosphate
  modified_base 10: mod_base = OTHER; note = 2'-O-methyluridine-3'-phosphate
  modified_base 11: mod_base = OTHER; note = 2'-O-methylcytidine-3'-phosphate
  modified_base 12: mod_base = OTHER; note = 2'-O-methyladenosine-3'-phosphate
  modified_base 13: mod_base = OTHER; note = 2'-O-methylcytidine-3'-phosphate
  modified_base 14: mod_base = OTHER; note = 2'-deoxy-2'-fluoroadenosine-3'-phosphate
  modified_base 15: mod_base = OTHER; note = 2'-O-methylguanosine-3'-phosphate
  modified_base 16: mod_base = OTHER; note = 2'-deoxy-2'-fluorouridine-3'-phosphate
  modified_base 17: mod_base = OTHER; note = 2'-O-methyladenosine-3'-phosphate
  modified_base 18: mod_base = OTHER; note = 2'-O-methylguanosine-3'-phosphate
  modified_base 19: mod_base = OTHER; note = 2'-O-methyluridine-3'-phosphate
  modified_base 20: mod_base = OTHER; note = 2'-O-methyluridine-3'-phosphate
  modified_base 21: mod_base = OTHER; note = 2'-O-methylcytidine-3'-phosphorothioate
  modified_base 22: mod_base = OTHER; note = 2'-O-methyladenosine-3'-phosphorothioate
  modified_base 23: mod_base = OTHER; note = 2'-O-methyladenosine
tgattcttttcacagtagttcaa

SEQ ID NO: 13344 - RNA, 23 nt, synthetic construct
  source 1..23: mol_type = other RNA
  modified_base 1: mod_base = OTHER; note = 2'-O-methyluridine-3'-phosphorothioate 5'-(E)-Vinylphosphonate
  modified_base 2: mod_base = OTHER; note = 2'-deoxy-2'-fluorouridine-3'-phosphorothioate
  modified_base 3: mod_base = OTHER; note = 2'-O-methyladenosine-3'-phosphate
  modified_base 4: mod_base = OTHER; note = 2'-O-methylcytidine-3'-phosphate
  modified_base 5: mod_base = OTHER; note = 2'-O-methyladenosine-3'-phosphate
  modified_base 6: mod_base = OTHER; note = 2'-deoxy-2'-fluoroadenosine-3'-phosphate
  modified_base 7: mod_base = OTHER; note = 2'-O-methyladenosine-3'-phosphate
  modified_base 8: mod_base = OTHER; note = 2'-O-methyladenosine-3'-phosphate
  modified_base 9: mod_base = OTHER; note = 2'-O-methyladenosine-3'-phosphate
  modified_base 10: mod_base = OTHER; note = 2'-O-methylguanosine-3'-phosphate
  modified_base 11: mod_base = OTHER; note = 2'-O-methyluridine-3'-phosphate
  modified_base 12: mod_base = OTHER; note = 2'-O-methylcytidine-3'-phosphate
  modified_base 13: mod_base = OTHER; note = 2'-O-methyluridine-3'-phosphate
  modified_base 14: mod_base = OTHER; note = 2'-deoxy-2'-fluorouridine-3'-phosphate
  modified_base 15: mod_base = OTHER; note = 2'-O-methyluridine-3'-phosphate
  modified_base 16: mod_base = OTHER; note = 2'-deoxy-2'-fluoroadenosine-3'-phosphate
  modified_base 17: mod_base = OTHER; note = 2'-O-methylcytidine-3'-phosphate
  modified_base 18: mod_base = OTHER; note = 2'-O-methyladenosine-3'-phosphate
  modified_base 19: mod_base = OTHER; note = 2'-O-methyladenosine-3'-phosphate
  modified_base 20: mod_base = OTHER; note = 2'-O-methylcytidine-3'-phosphate
  modified_base 21: mod_base = OTHER; note = 2'-O-methylguanosine-3'-phosphorothioate
  modified_base 22: mod_base = OTHER; note = 2'-O-methylguanosine-3'-phosphorothioate
  modified_base 23: mod_base = OTHER; note = 2'-O-methyluridine
ttacaaaaagtctttacaacggt

SEQ ID NO: 13345 - RNA, 23 nt, synthetic construct
  source 1..23: mol_type = other RNA
  modified_base 1: mod_base = OTHER; note = 2'-O-methyluridine-3'-phosphorothioate 5'-(E)-Vinylphosphonate
  modified_base 2: mod_base = OTHER; note = 2'-deoxy-2'-fluorouridine-3'-phosphorothioate
  modified_base 3: mod_base = OTHER; note = 2'-O-methyluridine-3'-phosphate
  modified_base 4: mod_base = OTHER; note = 2'-O-methyladenosine-3'-phosphate
  modified_base 5: mod_base = OTHER; note = 2'-O-methylcytidine-3'-phosphate
  modified_base 6: mod_base = OTHER; note = 2'-deoxy-2'-fluoroadenosine-3'-phosphate
  modified_base 7: mod_base = OTHER; note = 2'-O-methyladenosine-3'-phosphate
  modified_base 8: mod_base = OTHER; note = 2'-O-methyladenosine-3'-phosphate
  modified_base 9: mod_base = OTHER; note = 2'-O-methyladenosine-3'-phosphate
  modified_base 10: mod_base = OTHER; note = 2'-O-methyladenosine-3'-phosphate
  modified_base 11: mod_base = OTHER; note = 2'-O-methylguanosine-3'-phosphate
  modified_base 12: mod_base = OTHER; note = 2'-O-methyluridine-3'-phosphate
  modified_base 13: mod_base = OTHER; note = 2'-O-methylcytidine-3'-phosphate
  modified_base 14: mod_base = OTHER; note = 2'-deoxy-2'-fluorouridine-3'-phosphate
  modified_base 15: mod_base = OTHER; note = 2'-O-methyluridine-3'-phosphate
  modified_base 16: mod_base = OTHER; note = 2'-deoxy-2'-fluorouridine-3'-phosphate
  modified_base 17: mod_base = OTHER; note = 2'-O-methyladenosine-3'-phosphate
  modified_base 18: mod_base = OTHER; note = 2'-O-methylcytidine-3'-phosphate
  modified_base 19: mod_base = OTHER; note = 2'-O-methyladenosine-3'-phosphate
  modified_base 20: mod_base = OTHER; note = 2'-O-methyladenosine-3'-phosphate
  modified_base 21: mod_base = OTHER; note = 2'-O-methylcytidine-3'-phosphorothioate
  modified_base 22: mod_base = OTHER; note = 2'-O-methylguanosine-3'-phosphorothioate
  modified_base 23: mod_base = OTHER; note = 2'-O-methylguanosine
tttacaaaaagtctttacaacgg

SEQ ID NO: 13346 - RNA, 23 nt, synthetic construct
  source 1..23: mol_type = other RNA
  modified_base 1: mod_base = OTHER; note = 2'-O-methyluridine-3'-phosphorothioate 5'-(E)-Vinylphosphonate
  modified_base 2: mod_base = OTHER; note = 2'-deoxy-2'-fluorouridine-3'-phosphorothioate
  modified_base 3: mod_base = OTHER; note = 2'-O-methyladenosine-3'-phosphate
  modified_base 4: mod_base = OTHER; note = 2'-O-methylcytidine-3'-phosphate
  modified_base 5: mod_base = OTHER; note = 2'-O-methyluridine-3'-phosphate
  modified_base 6: mod_base = OTHER; note = 2'-deoxy-2'-fluorouridine-3'-phosphate
  modified_base 7: mod_base = OTHER; note = 2'-O-methyladenosine-3'-phosphate
  modified_base 8: mod_base = OTHER; note = 2'-O-methyladenosine-3'-phosphate
  modified_base 9: mod_base = OTHER; note = 2'-O-methylguanosine-3'-phosphate
  modified_base 10: mod_base = OTHER; note = 2'-O-methyladenosine-3'-phosphate
  modified_base 11: mod_base = OTHER; note = 2'-O-methylguanosine-3'-phosphate
  modified_base 12: mod_base = OTHER; note = 2'-O-methyluridine-3'-phosphate
  modified_base 13: mod_base = OTHER; note = 2'-O-methyladenosine-3'-phosphate
  modified_base 14: mod_base = OTHER; note = 2'-deoxy-2'-fluorouridine-3'-phosphate
  modified_base 15: mod_base = OTHER; note = 2'-O-methylcytidine-3'-phosphate
  modified_base 16: mod_base = OTHER; note = 2'-deoxy-2'-fluoroadenosine-3'-phosphate
  modified_base 17: mod_base = OTHER; note = 2'-O-methylguanosine-3'-phosphate
  modified_base 18: mod_base = OTHER; note = 2'-O-methylcytidine-3'-phosphate
  modified_base 19: mod_base = OTHER; note = 2'-O-methyluridine-3'-phosphate
  modified_base 20: mod_base = OTHER; note = 2'-O-methyladenosine-3'-phosphate
  modified_base 21: mod_base = OTHER; note = 2'-O-methylguanosine-3'-phosphorothioate
  modified_base 22: mod_base = OTHER; note = 2'-O-methylcytidine-3'-phosphorothioate
  modified_base 23: mod_base = OTHER; note = 2'-O-methyluridine
ttacttaagagtatcagctagct

SEQ ID NO: 13347 - RNA, 23 nt, synthetic construct
  source 1..23: mol_type = other RNA
  modified_base 1: mod_base = OTHER; note = 2'-O-methyluridine-3'-phosphorothioate 5'-(E)-Vinylphosphonate
  modified_base 2: mod_base = OTHER; note = 2'-deoxy-2'-fluorouridine-3'-phosphorothioate
  modified_base 3: mod_base = OTHER; note = 2'-O-methyluridine-3'-phosphate
  modified_base 4: mod_base = OTHER; note = 2'-O-methyladenosine-3'-phosphate
  modified_base 5: mod_base = OTHER; note = 2'-O-methyladenosine-3'-phosphate
  modified_base 6: mod_base = OTHER; note = 2'-deoxy-2'-fluoroguanosine-3'-phosphate
  modified_base 7: mod_base = OTHER; note = 2'-O-methyladenosine-3'-phosphate
  modified_base 8: mod_base = OTHER; note = 2'-O-methylguanosine-3'-phosphate
  modified_base 9: mod_base = OTHER; note = 2'-O-methyluridine-3'-phosphate
  modified_base 10: mod_base = OTHER; note = 2'-O-methyladenosine-3'-phosphate
  modified_base 11: mod_base = OTHER; note = 2'-O-methyluridine-3'-phosphate
  modified_base 12: mod_base = OTHER; note = 2'-O-methylcytidine-3'-phosphate
  modified_base 13: mod_base = OTHER; note = 2'-O-methyladenosine-3'-phosphate
  modified_base 14: mod_base = OTHER; note = 2'-deoxy-2'-fluoroguanosine-3'-phosphate
  modified_base 15: mod_base = OTHER; note = 2'-O-methylcytidine-3'-phosphate
  modified_base 16: mod_base = OTHER; note = 2'-deoxy-2'-fluorouridine-3'-phosphate
  modified_base 17: mod_base = OTHER; note = 2'-O-methyladenosine-3'-phosphate
  modified_base 18: mod_base = OTHER; note = 2'-O-methylguanosine-3'-phosphate
  modified_base 19: mod_base = OTHER; note = 2'-O-methylcytidine-3'-phosphate
  modified_base 20: mod_base = OTHER; note = 2'-O-methyluridine-3'-phosphate
  modified_base 21: mod_base = OTHER; note = 2'-O-methyluridine-3'-phosphorothioate
  modified_base 22: mod_base = OTHER; note = 2'-O-methyladenosine-3'-phosphorothioate
  modified_base 23: mod_base = OTHER; note = 2'-O-methylcytidine
tttaagagtatcagctagcttac

SEQ ID NO: 13348 - RNA, 23 nt, synthetic construct
  source 1..23: mol_type = other RNA
  modified_base 1: mod_base = OTHER; note = 2'-O-methyluridine-3'-phosphorothioate 5'-(E)-Vinylphosphonate
  modified_base 2: mod_base = OTHER; note = 2'-deoxy-2'-fluorouridine-3'-phosphorothioate
  modified_base 3: mod_base = OTHER; note = 2'-O-methyluridine-3'-phosphate
  modified_base 4: mod_base = OTHER; note = 2'-O-methyluridine-3'-phosphate
  modified_base 5: mod_base = OTHER; note = 2'-O-methylguanosine-3'-phosphate
  modified_base 6: mod_base = OTHER; note = 2'-deoxy-2'-fluoroadenosine-3'-phosphate
  modified_base 7: mod_base = OTHER; note = 2'-O-methyluridine-3'-phosphate
  modified_base 8: mod_base = OTHER; note = 2'-O-methyladenosine-3'-phosphate
  modified_base 9: mod_base = OTHER; note = 2'-O-methylcytidine-3'-phosphate
  modified_base 10: mod_base = OTHER; note = 2'-O-methyladenosine-3'-phosphate
  modified_base 11: mod_base = OTHER; note = 2'-O-methylguanosine-3'-phosphate
  modified_base 12: mod_base = OTHER; note = 2'-O-methyluridine-3'-phosphate
  modified_base 13: mod_base = OTHER; note = 2'-O-methyluridine-3'-phosphate
  modified_base 14: mod_base = OTHER; note = 2'-deoxy-2'-fluorouridine-3'-phosphate
  modified_base 15: mod_base = OTHER; note = 2'-O-methyladenosine-3'-phosphate
  modified_base 16: mod_base = OTHER; note = 2'-deoxy-2'-fluorouridine-3'-phosphate
  modified_base 17: mod_base = OTHER; note = 2'-O-methyluridine-3'-phosphate
  modified_base 18: mod_base = OTHER; note = 2'-O-methylguanosine-3'-phosphate
  modified_base 19: mod_base = OTHER; note = 2'-O-methylcytidine-3'-phosphate
  modified_base 20: mod_base = OTHER; note = 2'-O-methylcytidine-3'-phosphate
  modified_base 21: mod_base = OTHER; note = 2'-O-methylcytidine-3'-phosphorothioate
  modified_base 22: mod_base = OTHER; note = 2'-O-methyladenosine-3'-phosphorothioate
  modified_base 23: mod_base = OTHER; note = 2'-O-methyladenosine
ttttgatacagtttattgcccaa

SEQ ID NO: 13349 - RNA, 23 nt, synthetic construct
  source 1..23: mol_type = other RNA
  modified_base 1: mod_base = OTHER; note = 2'-O-methyluridine-3'-phosphorothioate 5'-(E)-Vinylphosphonate
  modified_base 2: mod_base = OTHER; note = 2'-deoxy-2'-fluoroadenosine-3'-phosphorothioate
  modified_base 3: mod_base = OTHER; note = 2'-O-methyluridine-3'-phosphate
  modified_base 4: mod_base = OTHER; note = 2'-O-methyladenosine-3'-phosphate
  modified_base 5: mod_base = OTHER; note = 2'-O-methylcytidine-3'-phosphate
  modified_base 6: mod_base = OTHER; note = 2'-deoxy-2'-fluoroadenosine-3'-phosphate
  modified_base 7: mod_base = OTHER; note = 2'-O-methylguanosine-3'-phosphate
  modified_base 8: mod_base = OTHER; note = 2'-O-methyluridine-3'-phosphate
  modified_base 9: mod_base = OTHER; note = 2'-O-methyluridine-3'-phosphate
  modified_base 10: mod_base = OTHER; note = 2'-O-methyluridine-3'-phosphate
  modified_base 11: mod_base = OTHER; note = 2'-O-methyladenosine-3'-phosphate
  modified_base 12: mod_base = OTHER; note = 2'-O-methyluridine-3'-phosphate
  modified_base 13: mod_base = OTHER; note = 2'-O-methyluridine-3'-phosphate
  modified_base 14: mod_base = OTHER; note = 2'-deoxy-2'-fluoroguanosine-3'-phosphate
  modified_base 15: mod_base = OTHER; note = 2'-O-methylcytidine-3'-phosphate
  modified_base 16: mod_base = OTHER; note = 2'-deoxy-2'-fluorocytidine-3'-phosphate
  modified_base 17: mod_base = OTHER; note = 2'-O-methylcytidine-3'-phosphate
  modified_base 18: mod_base = OTHER; note = 2'-O-methyladenosine-3'-phosphate
  modified_base 19: mod_base = OTHER; note = 2'-O-methyladenosine-3'-phosphate
  modified_base 20: mod_base = OTHER; note = 2'-O-methyluridine-3'-phosphate
  modified_base 21: mod_base = OTHER; note = 2'-O-methyluridine-3'-phosphorothioate
  modified_base 22: mod_base = OTHER; note = 2'-O-methylcytidine-3'-phosphorothioate
  modified_base 23: mod_base = OTHER; note = 2'-O-methylcytidine
tatacagtttattgcccaattcc

SEQ ID NO: 13350 - RNA, 23 nt, synthetic construct
  source 1..23: mol_type = other RNA
  modified_base 1: mod_base = OTHER; note = 2'-O-methyluridine-3'-phosphorothioate 5'-(E)-Vinylphosphonate
  modified_base 2: mod_base = OTHER; note = 2'-deoxy-2'-fluoroguanosine-3'-phosphorothioate
  modified_base 3: mod_base = OTHER; note = 2'-O-methyladenosine-3'-phosphate
  modified_base 4: mod_base = OTHER; note = 2'-O-methyluridine-3'-phosphate
  modified_base 5: mod_base = OTHER; note = 2'-O-methyladenosine-3'-phosphate
  modified_base 6: mod_base = OTHER; note = 2'-deoxy-2'-fluorocytidine-3'-phosphate
  modified_base 7: mod_base = OTHER; note = 2'-O-methyladenosine-3'-phosphate
  modified_base 8: mod_base = OTHER; note = 2'-O-methylguanosine-3'-phosphate
  modified_base 9: mod_base = OTHER; note = 2'-O-methyluridine-3'-phosphate
  modified_base 10: mod_base = OTHER; note = 2'-O-methyluridine-3'-phosphate
  modified_base 11: mod_base = OTHER; note = 2'-O-methyluridine-3'-phosphate
  modified_base 12: mod_base = OTHER; note = 2'-O-methyladenosine-3'-phosphate
  modified_base 13: mod_base = OTHER; note = 2'-O-methyluridine-3'-phosphate
  modified_base 14: mod_base = OTHER; note = 2'-deoxy-2'-fluorouridine-3'-phosphate
  modified_base 15: mod_base = OTHER; note = 2'-O-methylguanosine-3'-phosphate
  modified_base 16: mod_base = OTHER; note = 2'-deoxy-2'-fluorocytidine-3'-phosphate
  modified_base 17: mod_base = OTHER; note = 2'-O-methylcytidine-3'-phosphate
  modified_base 18: mod_base = OTHER; note = 2'-O-methylcytidine-3'-phosphate
  modified_base 19: mod_base = OTHER; note = 2'-O-methyladenosine-3'-phosphate
  modified_base 20: mod_base = OTHER; note = 2'-O-methyladenosine-3'-phosphate
  modified_base 21: mod_base = OTHER; note = 2'-O-methyluridine-3'-phosphorothioate
  modified_base 22: mod_base = OTHER; note = 2'-O-methyluridine-3'-phosphorothioate
  modified_base 23: mod_base = OTHER; note = 2'-O-methylcytidine
tgatacagtttattgcccaattc

SEQ ID NO: 13351 - RNA, 23 nt, synthetic construct
  source 1..23: mol_type = other RNA
  modified_base 1: mod_base = OTHER; note = 2'-O-methyluridine-3'-phosphorothioate 5'-(E)-Vinylphosphonate
  modified_base 2: mod_base = OTHER; note = 2'-deoxy-2'-fluorouridine-3'-phosphorothioate
  modified_base 3: mod_base = OTHER; note = 2'-O-methylguanosine-3'-phosphate
  modified_base 4: mod_base = OTHER; note = 2'-O-methyladenosine-3'-phosphate
  modified_base 5: mod_base = OTHER; note = 2'-O-methyluridine-3'-phosphate
  modified_base 6: mod_base = OTHER; note = 2'-deoxy-2'-fluoroadenosine-3'-phosphate
  modified_base 7: mod_base = OTHER; note = 2'-O-methylcytidine-3'-phosphate
  modified_base 8: mod_base = OTHER; note = 2'-O-methyladenosine-3'-phosphate
  modified_base 9: mod_base = OTHER; note = 2'-O-methylguanosine-3'-phosphate
  modified_base 10: mod_base = OTHER; note = 2'-O-methyluridine-3'-phosphate
  modified_base 11: mod_base = OTHER; note = 2'-O-methyluridine-3'-phosphate
  modified_base 12: mod_base = OTHER; note = 2'-O-methyluridine-3'-phosphate
  modified_base 13: mod_base = OTHER; note = 2'-O-methyladenosine-3'-phosphate
  modified_base 14: mod_base = OTHER; note = 2'-deoxy-2'-fluorouridine-3'-phosphate
  modified_base 15: mod_base = OTHER; note = 2'-O-methyluridine-3'-phosphate
  modified_base 16: mod_base = OTHER; note = 2'-deoxy-2'-fluoroguanosine-3'-phosphate
  modified_base 17: mod_base = OTHER; note = 2'-O-methylcytidine-3'-phosphate
  modified_base 18: mod_base = OTHER; note = 2'-O-methylcytidine-3'-phosphate
  modified_base 19: mod_base = OTHER; note = 2'-O-methylcytidine-3'-phosphate
  modified_base 20: mod_base = OTHER; note = 2'-O-methyladenosine-3'-phosphate
  modified_base 21: mod_base = OTHER; note = 2'-O-methyladenosine-3'-phosphorothioate
  modified_base 22: mod_base = OTHER; note = 2'-O-methyluridine-3'-phosphorothioate
  modified_base 23: mod_base = OTHER; note = 2'-O-methyluridine
ttgatacagtttattgcccaatt

SEQ ID NO: 13352 - RNA, 23 nt, synthetic construct
  source 1..23: mol_type = other RNA
  modified_base 1: mod_base = OTHER; note = 2'-O-methyluridine-3'-phosphorothioate 5'-(E)-Vinylphosphonate
  modified_base 2: mod_base = OTHER; note = 2'-deoxy-2'-fluorouridine-3'-phosphorothioate
  modified_base 3: mod_base = OTHER; note = 2'-O-methyluridine-3'-phosphate
  modified_base 4: mod_base = OTHER; note = 2'-O-methylguanosine-3'-phosphate
  modified_base 5: mod_base = OTHER; note = 2'-O-methyladenosine-3'-phosphate
  modified_base 6: mod_base = OTHER; note = 2'-deoxy-2'-fluorouridine-3'-phosphate
  modified_base 7: mod_base = OTHER; note = 2'-O-methyladenosine-3'-phosphate
  modified_base 8: mod_base = OTHER; note = 2'-O-methylcytidine-3'-phosphate
  modified_base 9: mod_base = OTHER; note = 2'-O-methyladenosine-3'-phosphate
  modified_base 10: mod_base = OTHER; note = 2'-O-methylguanosine-3'-phosphate
  modified_base 11: mod_base = OTHER; note = 2'-O-methyluridine-3'-phosphate
  modified_base 12: mod_base = OTHER; note = 2'-O-methyluridine-3'-phosphate
  modified_base 13: mod_base = OTHER; note = 2'-O-methyluridine-3'-phosphate
  modified_base 14: mod_base = OTHER; note = 2'-deoxy-2'-fluoroadenosine-3'-phosphate
  modified_base 15: mod_base = OTHER; note = 2'-O-methyluridine-3'-phosphate
  modified_base 16: mod_base = OTHER; note = 2'-deoxy-2'-fluorouridine-3'-phosphate
  modified_base 17: mod_base = OTHER; note = 2'-O-methylguanosine-3'-phosphate
  modified_base 18: mod_base = OTHER; note = 2'-O-methylcytidine-3'-phosphate
  modified_base 19: mod_base = OTHER; note = 2'-O-methylcytidine-3'-phosphate
  modified_base 20: mod_base = OTHER; note = 2'-O-methylcytidine-3'-phosphate
  modified_base 21: mod_base = OTHER; note = 2'-O-methyladenosine-3'-phosphorothioate
  modified_base 22: mod_base = OTHER; note = 2'-O-methyladenosine-3'-phosphorothioate
  modified_base 23: mod_base = OTHER; note = 2'-O-methyluridine
tttgatacagtttattgcccaat

SEQ ID NO: 13353 - RNA, 23 nt, synthetic construct
  source 1..23: mol_type = other RNA
  modified_base 1: mod_base = OTHER; note = 2'-O-methyluridine-3'-phosphorothioate 5'-(E)-Vinylphosphonate
  modified_base 2: mod_base = OTHER; note = 2'-deoxy-2'-fluorouridine-3'-phosphorothioate
  modified_base 3: mod_base = OTHER; note = 2'-O-methyluridine-3'-phosphate
  modified_base 4: mod_base = OTHER; note = 2'-O-methyluridine-3'-phosphate
  modified_base 5: mod_base = OTHER; note = 2'-O-methyluridine-3'-phosphate
  modified_base 6: mod_base = OTHER; note = 2'-deoxy-2'-fluoroguanosine-3'-phosphate
  modified_base 7: mod_base = OTHER; note = 2'-O-methyladenosine-3'-phosphate
  modified_base 8: mod_base = OTHER; note = 2'-O-methyluridine-3'-phosphate
  modified_base 9: mod_base = OTHER; note = 2'-O-methyladenosine-3'-phosphate
  modified_base 10: mod_base = OTHER; note = 2'-O-methylcytidine-3'-phosphate
  modified_base 11: mod_base = OTHER; note = 2'-O-methyladenosine-3'-phosphate
  modified_base 12: mod_base = OTHER; note = 2'-O-methylguanosine-3'-phosphate
  modified_base 13: mod_base = OTHER; note = 2'-O-methyluridine-3'-phosphate
  modified_base 14: mod_base = OTHER; note = 2'-deoxy-2'-fluorouridine-3'-phosphate
  modified_base 15: mod_base = OTHER; note = 2'-O-methyluridine-3'-phosphate
  modified_base 16: mod_base = OTHER; note = 2'-deoxy-2'-fluoroadenosine-3'-phosphate
  modified_base 17: mod_base = OTHER; note = 2'-O-methyluridine-3'-phosphate
  modified_base 18: mod_base = OTHER; note = 2'-O-methyluridine-3'-phosphate
  modified_base 19: mod_base = OTHER; note = 2'-O-methylguanosine-3'-phosphate
  modified_base 20: mod_base = OTHER; note = 2'-O-methylcytidine-3'-phosphate
  modified_base 21: mod_base = OTHER; note = 2'-O-methylcytidine-3'-phosphorothioate
  modified_base 22: mod_base = OTHER; note = 2'-O-methylcytidine-3'-phosphorothioate
  modified_base 23: mod_base = OTHER; note = 2'-O-methyladenosine
tttttgatacagtttattgccca

SEQ ID NO: 13354 - RNA, 23 nt, synthetic construct
  source 1..23: mol_type = other RNA
  modified_base 1: mod_base = OTHER; note = 2'-O-methyluridine-3'-phosphorothioate 5'-(E)-Vinylphosphonate
  modified_base 2: mod_base = OTHER; note = 2'-deoxy-2'-fluorouridine-3'-phosphorothioate
  modified_base 3: mod_base = OTHER; note = 2'-O-methyluridine-3'-phosphate
  modified_base 4: mod_base = OTHER; note = 2'-O-methyluridine-3'-phosphate
  modified_base 5: mod_base = OTHER; note = 2'-O-methyluridine-3'-phosphate
  modified_base 6: mod_base = OTHER; note = 2'-deoxy-2'-fluorouridine-3'-phosphate
  modified_base 7: mod_base = OTHER; note = 2'-O-methylguanosine-3'-phosphate
  modified_base 8: mod_base = OTHER; note = 2'-O-methyladenosine-3'-phosphate
  modified_base 9: mod_base = OTHER; note = 2'-O-methyluridine-3'-phosphate
  modified_base 10: mod_base = OTHER; note = 2'-O-methyladenosine-3'-phosphate
  modified_base 11: mod_base = OTHER; note = 2'-O-methylcytidine-3'-phosphate
  modified_base 12: mod_base = OTHER; note = 2'-O-methyladenosine-3'-phosphate
  modified_base 13: mod_base = OTHER; note = 2'-O-methylguanosine-3'-phosphate
  modified_base 14: mod_base = OTHER; note = 2'-deoxy-2'-fluorouridine-3'-phosphate
  modified_base 15: mod_base = OTHER; note = 2'-O-methyluridine-3'-phosphate
  modified_base 16: mod_base = OTHER; note = 2'-deoxy-2'-fluorouridine-3'-phosphate
  modified_base 17: mod_base = OTHER; note = 2'-O-methyladenosine-3'-phosphate
  modified_base 18: mod_base = OTHER; note = 2'-O-methyluridine-3'-phosphate
  modified_base 19: mod_base = OTHER; note = 2'-O-methyluridine-3'-phosphate
  modified_base 20: mod_base = OTHER; note = 2'-O-methylguanosine-3'-phosphate
  modified_base 21: mod_base = OTHER; note = 2'-O-methylcytidine-3'-phosphorothioate
  modified_base 22: mod_base = OTHER; note = 2'-O-methylcytidine-3'-phosphorothioate
  modified_base 23: mod_base = OTHER; note = 2'-O-methylcytidine
ttttttgatacagtttattgccc

SEQ ID NO: 13355 - RNA, 23 nt, synthetic construct
  source 1..23: mol_type = other RNA
  modified_base 1: mod_base = OTHER; note = 2'-O-methyluridine-3'-phosphorothioate 5'-(E)-Vinylphosphonate
  modified_base 2: mod_base = OTHER; note = 2'-deoxy-2'-fluoroadenosine-3'-phosphorothioate
  modified_base 3: mod_base = OTHER; note = 2'-O-methyluridine-3'-phosphate
  modified_base 4: mod_base = OTHER; note = 2'-O-methyluridine-3'-phosphate
  modified_base 5: mod_base = OTHER; note = 2'-O-methyluridine-3'-phosphate
  modified_base 6: mod_base = OTHER; note = 2'-deoxy-2'-fluorouridine-3'-phosphate
  modified_base 7: mod_base = OTHER; note = 2'-O-methyluridine-3'-phosphate
  modified_base 8: mod_base = OTHER; note = 2'-O-methylguanosine-3'-phosphate
  modified_base 9: mod_base = OTHER; note = 2'-O-methyladenosine-3'-phosphate
  modified_base 10: mod_base = OTHER; note = 2'-O-methyluridine-3'-phosphate
  modified_base 11: mod_base = OTHER; note = 2'-O-methyladenosine-3'-phosphate
  modified_base 12: mod_base = OTHER; note = 2'-O-methylcytidine-3'-phosphate
  modified_base 13: mod_base = OTHER; note = 2'-O-methyladenosine-3'-phosphate
  modified_base 14: mod_base = OTHER; note = 2'-deoxy-2'-fluoroguanosine-3'-phosphate
  modified_base 15: mod_base = OTHER; note = 2'-O-methyluridine-3'-phosphate
  modified_base 16: mod_base = OTHER; note = 2'-deoxy-2'-fluorouridine-3'-phosphate
  modified_base 17: mod_base = OTHER; note = 2'-O-methyluridine-3'-phosphate
  modified_base 18: mod_base = OTHER; note = 2'-O-methyladenosine-3'-phosphate
  modified_base 19: mod_base = OTHER; note = 2'-O-methyluridine-3'-phosphate
  modified_base 20: mod_base = OTHER; note = 2'-O-methyluridine-3'-phosphate
  modified_base 21: mod_base = OTHER; note = 2'-O-methylguanosine-3'-phosphorothioate
  modified_base 22: mod_base = OTHER; note = 2'-O-methylcytidine-3'-phosphorothioate
  modified_base 23: mod_base = OTHER; note = 2'-O-methylcytidine
tatttttgatacagtttattgcc

SEQ ID NO: 13356 - RNA, 23 nt, synthetic construct
  source 1..23: mol_type = other RNA
  modified_base 1: mod_base = OTHER; note = 2'-O-methyluridine-3'-phosphorothioate 5'-(E)-Vinylphosphonate
  modified_base 2: mod_base = OTHER; note = 2'-deoxy-2'-fluorocytidine-3'-phosphorothioate
  modified_base 3: mod_base = OTHER; note = 2'-O-methyladenosine-3'-phosphate
  modified_base 4: mod_base = OTHER; note = 2'-O-methyluridine-3'-phosphate
  modified_base 5: mod_base = OTHER; note = 2'-O-methylcytidine-3'-phosphate
  modified_base 6: mod_base = OTHER; note = 2'-deoxy-2'-fluorouridine-3'-phosphate
  modified_base 7: mod_base = OTHER; note = 2'-O-methyladenosine-3'-phosphate
  modified_base 8: mod_base = OTHER; note = 2'-O-methylcytidine-3'-phosphate
  modified_base 9: mod_base = OTHER; note = 2'-O-methyladenosine-3'-phosphate
  modified_base 10: mod_base = OTHER; note = 2'-O-methyluridine-3'-phosphate
  modified_base 11: mod_base = OTHER; note = 2'-O-methyladenosine-3'-phosphate
  modified_base 12: mod_base = OTHER; note = 2'-O-methyluridine-3'-phosphate
  modified_base 13: mod_base = OTHER; note = 2'-O-methyluridine-3'-phosphate
  modified_base 14: mod_base = OTHER; note = 2'-deoxy-2'-fluorouridine-3'-phosphate
  modified_base 15: mod_base = OTHER; note = 2'-O-methyluridine-3'-phosphate
  modified_base 16: mod_base = OTHER; note = 2'-deoxy-2'-fluorouridine-3'-phosphate
  modified_base 17: mod_base = OTHER; note = 2'-O-methylguanosine-3'-phosphate
  modified_base 18: mod_base = OTHER; note = 2'-O-methyladenosine-3'-phosphate
  modified_base 19: mod_base = OTHER; note = 2'-O-methyluridine-3'-phosphate
  modified_base 20: mod_base = OTHER; note = 2'-O-methyladenosine-3'-phosphate
  modified_base 21: mod_base = OTHER; note = 2'-O-methylcytidine-3'-phosphorothioate
  modified_base 22: mod_base = OTHER; note = 2'-O-methyladenosine-3'-phosphorothioate
  modified_base 23: mod_base = OTHER; note = 2'-O-methylguanosine
tcatctacatatttttgatacag

SEQ ID NO: 13357 - RNA, 23 nt, synthetic construct
  source 1..23: mol_type = other RNA
  modified_base 1: mod_base = OTHER; note = 2'-O-methyluridine-3'-phosphorothioate 5'-(E)-Vinylphosphonate
  modified_base 2: mod_base = OTHER; note = 2'-deoxy-2'-fluorocytidine-3'-phosphorothioate
  modified_base 3: mod_base = OTHER; note = 2'-O-methylcytidine-3'-phosphate
  modified_base 4: mod_base = OTHER; note = 2'-O-methyladenosine-3'-phosphate
  modified_base 5: mod_base = OTHER; note = 2'-O-methyluridine-3'-phosphate
  modified_base 6: mod_base = OTHER; note = 2'-deoxy-2'-fluorocytidine-3'-phosphate
  modified_base 7: mod_base = OTHER; note = 2'-O-methyluridine-3'-phosphate
  modified_base 8: mod_base = OTHER; note = 2'-O-methyladenosine-3'-phosphate
  modified_base 9: mod_base = OTHER; note = 2'-O-methylcytidine-3'-phosphate
  modified_base 10: mod_base = OTHER; note = 2'-O-methyladenosine-3'-phosphate
  modified_base 11: mod_base = OTHER; note = 2'-O-methyluridine-3'-phosphate
  modified_base 12: mod_base = OTHER; note = 2'-O-methyladenosine-3'-phosphate
  modified_base 13: mod_base = OTHER; note = 2'-O-methyluridine-3'-phosphate
  modified_base 14: mod_base = OTHER; note = 2'-deoxy-2'-fluorouridine-3'-phosphate
  modified_base 15: mod_base = OTHER; note = 2'-O-methyluridine-3'-phosphate
  modified_base 16: mod_base = OTHER; note = 2'-deoxy-2'-fluorouridine-3'-phosphate
  modified_base 17: mod_base = OTHER; note = 2'-O-methyluridine-3'-phosphate
  modified_base 18: mod_base = OTHER; note = 2'-O-methylguanosine-3'-phosphate
  modified_base 19: mod_base = OTHER; note = 2'-O-methyladenosine-3'-phosphate
  modified_base 20: mod_base = OTHER; note = 2'-O-methyluridine-3'-phosphate
  modified_base 21: mod_base = OTHER; note = 2'-O-methyladenosine-3'-phosphorothioate
  modified_base 22: mod_base = OTHER; note = 2'-O-methylcytidine-3'-phosphorothioate
  modified_base 23: mod_base = OTHER; note = 2'-O-methyladenosine
tccatctacatatttttgataca

SEQ ID NO: 13358 - RNA, 23 nt, synthetic construct
  source 1..23: mol_type = other RNA
  modified_base 1: mod_base = OTHER; note = 2'-O-methyluridine-3'-phosphorothioate 5'-(E)-Vinylphosphonate
  modified_base 2: mod_base = OTHER; note = 2'-deoxy-2'-fluorouridine-3'-phosphorothioate
  modified_base 3: mod_base = OTHER; note = 2'-O-methylcytidine-3'-phosphate
  modified_base 4: mod_base = OTHER; note = 2'-O-methylcytidine-3'-phosphate
  modified_base 5: mod_base = OTHER; note = 2'-O-methyladenosine-3'-phosphate
  modified_base 6: mod_base = OTHER; note = 2'-deoxy-2'-fluorouridine-3'-phosphate
  modified_base 7: mod_base = OTHER; note = 2'-O-methylcytidine-3'-phosphate
  modified_base 8: mod_base = OTHER; note = 2'-O-methyluridine-3'-phosphate
  modified_base 9: mod_base = OTHER; note = 2'-O-methyladenosine-3'-phosphate
  modified_base 10: mod_base = OTHER; note = 2'-O-methylcytidine-3'-phosphate
  modified_base 11: mod_base = OTHER; note = 2'-O-methyladenosine-3'-phosphate
  modified_base 12: mod_base = OTHER; note = 2'-O-methyluridine-3'-phosphate
  modified_base 13: mod_base = OTHER; note = 2'-O-methyladenosine-3'-phosphate
  modified_base 14: mod_base = OTHER; note = 2'-deoxy-2'-fluorouridine-3'-phosphate
  modified_base 15: mod_base = OTHER; note = 2'-O-methyluridine-3'-phosphate
  modified_base 16: mod_base = OTHER; note = 2'-deoxy-2'-fluorouridine-3'-phosphate
  modified_base 17: mod_base = OTHER; note = 2'-O-methyluridine-3'-phosphate
  modified_base 18: mod_base = OTHER; note = 2'-O-methyluridine-3'-phosphate
  modified_base 19: mod_base = OTHER; note = 2'-O-methylguanosine-3'-phosphate
  modified_base 20: mod_base = OTHER; note = 2'-O-methyladenosine-3'-phosphate
  modified_base 21: mod_base = OTHER; note = 2'-O-methyluridine-3'-phosphorothioate
  modified_base 22: mod_base = OTHER; note = 2'-O-methyladenosine-3'-phosphorothioate
  modified_base 23: mod_base = OTHER; note = 2'-O-methylcytidine
ttccatctacatatttttgatac

SEQ ID NO: 13359 - RNA, 23 nt, synthetic construct
  source 1..23: mol_type = other RNA
  modified_base 1: mod_base = OTHER; note = 2'-O-methyluridine-3'-phosphorothioate 5'-(E)-Vinylphosphonate
  modified_base 2: mod_base = OTHER; note = 2'-deoxy-2'-fluorouridine-3'-phosphorothioate
  modified_base 3: mod_base = OTHER; note = 2'-O-methyluridine-3'-phosphate
  modified_base 4: mod_base = OTHER; note = 2'-O-methyluridine-3'-phosphate
  modified_base 5: mod_base = OTHER; note = 2'-O-methylguanosine-3'-phosphate
  modified_base 6: mod_base = OTHER; note = 2'-deoxy-2'-fluoroadenosine-3'-phosphate
  modified_base 7: mod_base = OTHER; note = 2'-O-methyladenosine-3'-phosphate
  modified_base 8: mod_base = OTHER; note = 2'-O-methyladenosine-3'-phosphate
  modified_base 9: mod_base = OTHER; note = 2'-O-methyluridine-3'-phosphate
  modified_base 10: mod_base = OTHER; note = 2'-O-methyluridine-3'-phosphate
  modified_base 11: mod_base = OTHER; note = 2'-O-methylcytidine-3'-phosphate
  modified_base 12: mod_base = OTHER; note = 2'-O-methyluridine-3'-phosphate
  modified_base 13: mod_base = OTHER; note = 2'-O-methylcytidine-3'-phosphate
  modified_base 14: mod_base = OTHER; note = 2'-deoxy-2'-fluorouridine-3'-phosphate
  modified_base 15: mod_base = OTHER; note = 2'-O-methyluridine-3'-phosphate
  modified_base 16: mod_base = OTHER; note = 2'-deoxy-2'-fluorocytidine-3'-phosphate
  modified_base 17: mod_base = OTHER; note = 2'-O-methyladenosine-3'-phosphate
  modified_base 18: mod_base = OTHER; note = 2'-O-methylcytidine-3'-phosphate
  modified_base 19: mod_base = OTHER; note = 2'-O-methylcytidine-3'-phosphate
  modified_base 20: mod_base = OTHER; note = 2'-O-methyluridine-3'-phosphate
  modified_base 21: mod_base = OTHER; note = 2'-O-methyluridine-3'-phosphorothioate
  modified_base 22: mod_base = OTHER; note = 2'-O-methylcytidine-3'-phosphorothioate
  modified_base 23: mod_base = OTHER; note = 2'-O-methylcytidine
ttttgaaattctcttcaccttcc

SEQ ID NO: 13360 - RNA, 23 nt, synthetic construct
  source 1..23: mol_type = other RNA
  modified_base 1: mod_base = OTHER; note = 2'-O-methyluridine-3'-phosphorothioate 5'-(E)-Vinylphosphonate
  modified_base 2: mod_base = OTHER; note = 2'-deoxy-2'-fluoroadenosine-3'-phosphorothioate
  modified_base 3: mod_base = OTHER; note = 2'-O-methylguanosine-3'-phosphate
  modified_base 4: mod_base = OTHER; note = 2'-O-methyluridine-3'-phosphate
  modified_base 5: mod_base = OTHER; note = 2'-O-methyluridine-3'-phosphate
  modified_base 6: mod_base = OTHER; note = 2'-deoxy-2'-fluorouridine-3'-phosphate
  modified_base 7: mod_base = OTHER; note = 2'-O-methylguanosine-3'-phosphate
  modified_base 8: mod_base = OTHER; note = 2'-O-methyladenosine-3'-phosphate
  modified_base 9: mod_base = OTHER; note = 2'-O-methyladenosine-3'-phosphate
  modified_base 10: mod_base = OTHER; note = 2'-O-methyladenosine-3'-phosphate
  modified_base 11: mod_base = OTHER; note = 2'-O-methyluridine-3'-phosphate
  modified_base 12: mod_base = OTHER; note = 2'-O-methyluridine-3'-phosphate
  modified_base 13: mod_base = OTHER; note = 2'-O-methylcytidine-3'-phosphate
  modified_base 14: mod_base = OTHER; note = 2'-deoxy-2'-fluorouridine-3'-phosphate
  modified_base 15: mod_base = OTHER; note = 2'-O-methylcytidine-3'-phosphate
  modified_base 16: mod_base = OTHER; note = 2'-deoxy-2'-fluorouridine-3'-phosphate
  modified_base 17: mod_base = OTHER; note = 2'-O-methyluridine-3'-phosphate
  modified_base 18: mod_base = OTHER; note = 2'-O-methylcytidine-3'-phosphate
  modified_base 19: mod_base = OTHER; note = 2'-O-methyladenosine-3'-phosphate
  modified_base 20: mod_base = OTHER; note = 2'-O-methylcytidine-3'-phosphate
  modified_base 21: mod_base = OTHER; note = 2'-O-methylcytidine-3'-phosphorothioate
  modified_base 22: mod_base = OTHER; note = 2'-O-methyluridine-3'-phosphorothioate
  modified_base 23: mod_base = OTHER; note = 2'-O-methyluridine
tagtttgaaattctcttcacctt

SEQ ID NO: 13361 - RNA, 23 nt, synthetic construct
  source 1..23: mol_type = other RNA
  modified_base 1: mod_base = OTHER; note = 2'-O-methyluridine-3'-phosphorothioate 5'-(E)-Vinylphosphonate
  modified_base 2: mod_base = OTHER; note = 2'-deoxy-2'-fluoroguanosine-3'-phosphorothioate
  modified_base 3: mod_base = OTHER; note = 2'-O-methyladenosine-3'-phosphate
  modified_base 4: mod_base = OTHER; note = 2'-O-methylguanosine-3'-phosphate
  modified_base 5: mod_base = OTHER; note = 2'-O-methyluridine-3'-phosphate
  modified_base 6: mod_base = OTHER; note = 2'-deoxy-2'-fluorouridine-3'-phosphate
  modified_base 7: mod_base = OTHER; note = 2'-O-methyluridine-3'-phosphate
  modified_base 8: mod_base = OTHER; note = 2'-O-methylguanosine-3'-phosphate
  modified_base 9: mod_base = OTHER; note = 2'-O-methyladenosine-3'-phosphate
  modified_base 10: mod_base = OTHER; note = 2'-O-methyladenosine-3'-phosphate
  modified_base 11: mod_base = OTHER; note = 2'-O-methyladenosine-3'-phosphate
  modified_base 12: mod_base = OTHER; note = 2'-O-methyluridine-3'-phosphate
  modified_base 13: mod_base = OTHER; note = 2'-O-methyluridine-3'-phosphate
  modified_base 14: mod_base = OTHER; note = 2'-deoxy-2'-fluorocytidine-3'-phosphate
  modified_base 15: mod_base = OTHER; note = 2'-O-methyluridine-3'-phosphate
  modified_base 16: mod_base = OTHER; note = 2'-deoxy-2'-fluorocytidine-3'-phosphate
  modified_base 17: mod_base = OTHER; note = 2'-O-methyluridine-3'-phosphate
  modified_base 18: mod_base = OTHER; note = 2'-O-methyluridine-3'-phosphate
  modified_base 19: mod_base = OTHER; note = 2'-O-methylcytidine-3'-phosphate
  modified_base 20: mod_base = OTHER; note = 2'-O-methyladenosine-3'-phosphate
  modified_base 21: mod_base = OTHER; note = 2'-O-methylcytidine-3'-phosphorothioate
  modified_base 22: mod_base = OTHER; note = 2'-O-methylcytidine-3'-phosphorothioate
  modified_base 23: mod_base = OTHER; note = 2'-O-methyluridine
tgagtttgaaattctcttcacct

SEQ ID NO: 13362 - RNA, 23 nt, synthetic construct
  source 1..23: mol_type = other RNA
  modified_base 1: mod_base = OTHER; note = 2'-O-methyluridine-3'-phosphorothioate 5'-(E)-Vinylphosphonate
  modified_base 2: mod_base = OTHER; note = 2'-deoxy-2'-fluorocytidine-3'-phosphorothioate
  modified_base 3: mod_base = OTHER; note = 2'-O-methyluridine-3'-phosphate
  modified_base 4: mod_base = OTHER; note = 2'-O-methyladenosine-3'-phosphate
  modified_base 5: mod_base = OTHER; note = 2'-O-methylguanosine-3'-phosphate
  modified_base 6: mod_base = OTHER; note = 2'-deoxy-2'-fluoroadenosine-3'-phosphate
  modified_base 7: mod_base = OTHER; note = 2'-O-methyladenosine-3'-phosphate
  modified_base 8: mod_base = OTHER; note = 2'-O-methyladenosine-3'-phosphate
  modified_base 9: mod_base = OTHER; note = 2'-O-methyluridine-3'-phosphate
  modified_base 10: mod_base = OTHER; note = 2'-O-methyluridine-3'-phosphate
  modified_base 11: mod_base = OTHER; note = 2'-O-methyladenosine-3'-phosphate
  modified_base 12: mod_base = OTHER; note = 2'-O-methyladenosine-3'-phosphate
  modified_base 13: mod_base = OTHER; note = 2'-O-methyluridine-3'-phosphate
  modified_base 14: mod_base = OTHER; note = 2'-deoxy-2'-fluoroguanosine-3'-phosphate
  modified_base 15: mod_base = OTHER; note = 2'-O-methyladenosine-3'-phosphate
  modified_base 16: mod_base = OTHER; note = 2'-deoxy-2'-fluoroadenosine-3'-phosphate
  modified_base 17: mod_base = OTHER; note = 2'-O-methyladenosine-3'-phosphate
  modified_base 18: mod_base = OTHER; note = 2'-O-methylcytidine-3'-phosphate
  modified_base 19: mod_base = OTHER; note = 2'-O-methyladenosine-3'-phosphate
  modified_base 20: mod_base = OTHER; note = 2'-O-methyluridine-3'-phosphate
  modified_base 21: mod_base = OTHER; note = 2'-O-methylcytidine-3'-phosphorothioate
  modified_base 22: mod_base = OTHER; note = 2'-O-methyluridine-3'-phosphorothioate
  modified_base 23: mod_base = OTHER; note = 2'-O-methylguanosine
tctagaaattaatgaaacatctg

SEQ ID NO: 13363 - RNA, 23 nt, synthetic construct
  source 1..23: mol_type = other RNA
  modified_base 1: mod_base = OTHER; note = 2'-O-methyluridine-3'-phosphorothioate 5'-(E)-Vinylphosphonate
  modified_base 2: mod_base = OTHER; note = 2'-deoxy-2'-fluorocytidine-3'-phosphorothioate
  modified_base 3: mod_base = OTHER; note = 2'-O-methyladenosine-3'-phosphate
  modified_base 4: mod_base = OTHER; note = 2'-O-methyluridine-3'-phosphate
  modified_base 5: mod_base = OTHER; note = 2'-O-methyladenosine-3'-phosphate
  modified_base 6: mod_base = OTHER; note = 2'-deoxy-2'-fluorouridine-3'-phosphate
  modified_base 7: mod_base = OTHER; note = 2'-O-methyluridine-3'-phosphate
  modified_base 8: mod_base = OTHER; note = 2'-O-methyluridine-3'-phosphate
  modified_base 9: mod_base = OTHER; note = 2'-O-methyluridine-3'-phosphate
  modified_base 10: mod_base = OTHER; note = 2'-O-methylcytidine-3'-phosphate
  modified_base 11: mod_base = OTHER; note = 2'-O-methyladenosine-3'-phosphate
  modified_base 12: mod_base = OTHER; note = 2'-O-methylcytidine-3'-phosphate
  modified_base 13: mod_base = OTHER; note = 2'-O-methyladenosine-3'-phosphate
  modified_base 14: mod_base = OTHER; note = 2'-deoxy-2'-fluoroguanosine-3'-phosphate
  modified_base 15: mod_base = OTHER; note = 2'-O-methyladenosine-3'-phosphate
  modified_base 16: mod_base = OTHER; note = 2'-deoxy-2'-fluorocytidine-3'-phosphate
  modified_base 17: mod_base = OTHER; note = 2'-O-methyluridine-3'-phosphate
  modified_base 18: mod_base = OTHER; note = 2'-O-methyladenosine-3'-phosphate
  modified_base 19: mod_base = OTHER; note = 2'-O-methylguanosine-3'-phosphate
  modified_base 20: mod_base = OTHER; note = 2'-O-methyladenosine-3'-phosphate
  modified_base 21: mod_base = OTHER; note = 2'-O-methyladenosine-3'-phosphorothioate
  modified_base 22: mod_base = OTHER; note = 2'-O-methyladenosine-3'-phosphorothioate
  modified_base 23: mod_base = OTHER; note = 2'-O-methyluridine
tcatattttcacagactagaaat

SEQ ID NO: 13364 - RNA, 23 nt, synthetic construct
  source 1..23: mol_type = other RNA
  modified_base 1: mod_base = OTHER; note = 2'-O-methyluridine-3'-phosphorothioate 5'-(E)-Vinylphosphonate
  modified_base 2: mod_base = OTHER; note = 2'-deoxy-2'-fluoroguanosine-3'-phosphorothioate
  modified_base 3: mod_base = OTHER; note = 2'-O-methylcytidine-3'-phosphate
  modified_base 4: mod_base = OTHER; note = 2'-O-methyladenosine-3'-phosphate
  modified_base 5: mod_base = OTHER; note = 2'-O-methyluridine-3'-phosphate
  modified_base 6: mod_base = OTHER; note = 2'-deoxy-2'-fluoroadenosine-3'-phosphate
  modified_base 7: mod_base = OTHER; note = 2'-O-methyluridine-3'-phosphate
  modified_base 8: mod_base = OTHER; note = 2'-O-methyluridine-3'-phosphate
  modified_base 9: mod_base = OTHER; note = 2'-O-methyluridine-3'-phosphate
  modified_base 10: mod_base = OTHER; note = 2'-O-methyluridine-3'-phosphate
  modified_base 11: mod_base = OTHER; note = 2'-O-methylcytidine-3'-phosphate
  modified_base 12: mod_base = OTHER; note = 2'-O-methyladenosine-3'-phosphate
  modified_base 13: mod_base = OTHER; note = 2'-O-methylcytidine-3'-phosphate
  modified_base 14: mod_base = OTHER; note = 2'-deoxy-2'-fluoroadenosine-3'-phosphate
  modified_base 15: mod_base = OTHER; note = 2'-O-methylguanosine-3'-phosphate
  modified_base 16: mod_base = OTHER; note = 2'-deoxy-2'-fluoroadenosine-3'-phosphate
  modified_base 17: mod_base = OTHER; note = 2'-O-methylcytidine-3'-phosphate
  modified_base 18: mod_base = OTHER; note = 2'-O-methyluridine-3'-phosphate
  modified_base 19: mod_base = OTHER; note = 2'-O-methyladenosine-3'-phosphate
  modified_base 20: mod_base = OTHER; note = 2'-O-methylguanosine-3'-phosphate
  modified_base 21: mod_base = OTHER; note = 2'-O-methyladenosine-3'-phosphorothioate
  modified_base 22: mod_base = OTHER; note = 2'-O-methyladenosine-3'-phosphorothioate
  modified_base 23: mod_base = OTHER; note = 2'-O-methyladenosine
tgcatattttcacagactagaaa

SEQ ID NO: 13365 - RNA, 23 nt, synthetic construct
  source 1..23: mol_type = other RNA
  modified_base 1: mod_base = OTHER; note = 2'-O-methyluridine-3'-phosphorothioate 5'-(E)-Vinylphosphonate
  modified_base 2: mod_base = OTHER; note = 2'-deoxy-2'-fluorouridine-3'-phosphorothioate
  modified_base 3: mod_base = OTHER; note = 2'-O-methylguanosine-3'-phosphate
  modified_base 4: mod_base = OTHER; note = 2'-O-methylcytidine-3'-phosphate
  modified_base 5: mod_base = OTHER; note = 2'-O-methyladenosine-3'-phosphate
  modified_base 6: mod_base = OTHER; note = 2'-deoxy-2'-fluorouridine-3'-phosphate
  modified_base 7: mod_base = OTHER; note = 2'-O-methyladenosine-3'-phosphate
  modified_base 8: mod_base = OTHER; note = 2'-O-methyluridine-3'-phosphate
  modified_base 9: mod_base = OTHER; note = 2'-O-methyluridine-3'-phosphate
  modified_base 10: mod_base = OTHER; note = 2'-O-methyluridine-3'-phosphate
  modified_base 11: mod_base = OTHER; note = 2'-O-methyluridine-3'-phosphate
  modified_base 12: mod_base = OTHER; note = 2'-O-methylcytidine-3'-phosphate
  modified_base 13: mod_base = OTHER; note = 2'-O-methyladenosine-3'-phosphate
  modified_base 14: mod_base = OTHER; note = 2'-deoxy-2'-fluorocytidine-3'-phosphate
  modified_base 15: mod_base = OTHER; note = 2'-O-methyladenosine-3'-phosphate
  modified_base 16: mod_base = OTHER; note = 2'-deoxy-2'-fluoroguanosine-3'-phosphate
  modified_base 17: mod_base = OTHER; note = 2'-O-methyladenosine-3'-phosphate
  modified_base 18: mod_base = OTHER; note = 2'-O-methylcytidine-3'-phosphate
  modified_base 19: mod_base = OTHER; note = 2'-O-methyluridine-3'-phosphate
  modified_base 20: mod_base = OTHER; note = 2'-O-methyladenosine-3'-phosphate
  modified_base 21: mod_base = OTHER; note = 2'-O-methylguanosine-3'-phosphorothioate
  modified_base 22: mod_base = OTHER; note = 2'-O-methyladenosine-3'-phosphorothioate
  modified_base 23: mod_base = OTHER; note = 2'-O-methyladenosine
ttgcatattttcacagactagaa

SEQ ID NO: 13366 - RNA, 23 nt, synthetic construct
  source 1..23: mol_type = other RNA
  modified_base 1: mod_base = OTHER; note = 2'-O-methyluridine-3'-phosphorothioate 5'-(E)-Vinylphosphonate
  modified_base 2: mod_base = OTHER; note = 2'-deoxy-2'-fluoroadenosine-3'-phosphorothioate
  modified_base 3: mod_base = OTHER; note = 2'-O-methyluridine-3'-phosphate
  modified_base 4: mod_base = OTHER; note = 2'-O-methylguanosine-3'-phosphate
  modified_base 5: mod_base = OTHER; note = 2'-O-methylcytidine-3'-phosphate
  modified_base 6: mod_base = OTHER; note = 2'-deoxy-2'-fluoroadenosine-3'-phosphate
  modified_base 7: mod_base = OTHER; note = 2'-O-methyluridine-3'-phosphate
  modified_base 8: mod_base = OTHER; note = 2'-O-methyladenosine-3'-phosphate
  modified_base 9: mod_base = OTHER; note = 2'-O-methyluridine-3'-phosphate
  modified_base 10: mod_base = OTHER; note = 2'-O-methyluridine-3'-phosphate
  modified_base 11: mod_base = OTHER; note = 2'-O-methyluridine-3'-phosphate
  modified_base 12: mod_base = OTHER; note = 2'-O-methyluridine-3'-phosphate
  modified_base 13: mod_base = OTHER; note = 2'-O-methylcytidine-3'-phosphate
  modified_base 14: mod_base = OTHER; note = 2'-deoxy-2'-fluoroadenosine-3'-phosphate
  modified_base 15: mod_base = OTHER; note = 2'-O-methylcytidine-3'-phosphate
  modified_base 16: mod_base = OTHER; note = 2'-deoxy-2'-fluoroadenosine-3'-phosphate
  modified_base 17: mod_base = OTHER; note = 2'-O-methylguanosine-3'-phosphate
  modified_base 18: mod_base = OTHER; note = 2'-O-methyladenosine-3'-phosphate
  modified_base 19: mod_base = OTHER; note = 2'-O-methylcytidine-3'-phosphate
  modified_base 20: mod_base = OTHER; note = 2'-O-methyluridine-3'-phosphate
  modified_base 21: mod_base = OTHER; note = 2'-O-methyladenosine-3'-phosphorothioate
  modified_base 22: mod_base = OTHER; note = 2'-O-methylguanosine-3'-phosphorothioate
  modified_base 23: mod_base = OTHER; note = 2'-O-methyladenosine
tatgcatattttcacagactaga

SEQ ID NO: 13367 - RNA, 23 nt, synthetic construct
  source 1..23: mol_type = other RNA
  modified_base 1: mod_base = OTHER; note = 2'-O-methyluridine-3'-phosphorothioate 5'-(E)-Vinylphosphonate
  modified_base 2: mod_base = OTHER; note = 2'-deoxy-2'-fluoroadenosine-3'-phosphorothioate
  modified_base 3: mod_base = OTHER; note = 2'-O-methyladenosine-3'-phosphate
  modified_base 4: mod_base = OTHER; note = 2'-O-methyluridine-3'-phosphate
  modified_base 5: mod_base = OTHER; note = 2'-O-methylguanosine-3'-phosphate
  modified_base 6: mod_base = OTHER; note = 2'-deoxy-2'-fluorocytidine-3'-phosphate
  modified_base 7: mod_base = OTHER; note = 2'-O-methyladenosine-3'-phosphate
  modified_base 8: mod_base = OTHER; note = 2'-O-methyluridine-3'-phosphate
  modified_base 9: mod_base = OTHER; note = 2'-O-methyladenosine-3'-phosphate
  modified_base 10: mod_base = OTHER; note = 2'-O-methyluridine-3'-phosphate
  modified_base 11: mod_base = OTHER; note = 2'-O-methyluridine-3'-phosphate
  modified_base 12: mod_base = OTHER; note = 2'-O-methyluridine-3'-phosphate
  modified_base 13: mod_base = OTHER; note = 2'-O-methyluridine-3'-phosphate
  modified_base 14: mod_base = OTHER; note = 2'-deoxy-2'-fluorocytidine-3'-phosphate
  modified_base 15: mod_base = OTHER; note = 2'-O-methyladenosine-3'-phosphate
  modified_base 16: mod_base = OTHER; note = 2'-deoxy-2'-fluorocytidine-3'-phosphate
  modified_base 17: mod_base = OTHER; note = 2'-O-methyladenosine-3'-phosphate
  modified_base 18: mod_base = OTHER; note = 2'-O-methylguanosine-3'-phosphate
  modified_base 19: mod_base = OTHER; note = 2'-O-methyladenosine-3'-phosphate
  modified_base 20: mod_base = OTHER; note = 2'-O-methylcytidine-3'-phosphate
  modified_base 21: mod_base = OTHER; note = 2'-O-methyluridine-3'-phosphorothioate
  modified_base 22: mod_base = OTHER; note = 2'-O-methyladenosine-3'-phosphorothioate
  modified_base 23: mod_base = OTHER; note = 2'-O-methylguanosine
taatgcatattttcacagactag

SEQ ID NO: 13368 - RNA, 23 nt, synthetic construct
  source 1..23: mol_type = other RNA
  modified_base 1: mod_base = OTHER; note = 2'-O-methyluridine-3'-phosphorothioate 5'-(E)-Vinylphosphonate
  modified_base 2: mod_base = OTHER; note = 2'-deoxy-2'-fluoroadenosine-3'-phosphorothioate
  modified_base 3: mod_base = OTHER; note = 2'-O-methyladenosine-3'-phosphate
  modified_base 4: mod_base = OTHER; note = 2'-O-methyladenosine-3'-phosphate
  modified_base 5: mod_base = OTHER; note = 2'-O-methyluridine-3'-phosphate
  modified_base 6: mod_base = OTHER; note = 2'-deoxy-2'-fluoroguanosine-3'-phosphate
  modified_base 7: mod_base = OTHER; note = 2'-O-methylcytidine-3'-phosphate
  modified_base 8: mod_base = OTHER; note = 2'-O-methyladenosine-3'-phosphate
  modified_base 9: mod_base = OTHER; note = 2'-O-methyluridine-3'-phosphate
  modified_base 10: mod_base = OTHER; note = 2'-O-methyladenosine-3'-phosphate
  modified_base 11: mod_base = OTHER; note = 2'-O-methyluridine-3'-phosphate
  modified_base 12: mod_base = OTHER; note = 2'-O-methyluridine-3'-phosphate
  modified_base 13: mod_base = OTHER; note = 2'-O-methyluridine-3'-phosphate
  modified_base 14: mod_base = OTHER; note = 2'-deoxy-2'-fluorouridine-3'-phosphate
  modified_base 15: mod_base = OTHER; note = 2'-O-methylcytidine-3'-phosphate
  modified_base 16: mod_base = OTHER; note = 2'-deoxy-2'-fluoroadenosine-3'-phosphate
  modified_base 17: mod_base = OTHER; note = 2'-O-methylcytidine-3'-phosphate
  modified_base 18: mod_base = OTHER; note = 2'-O-methyladenosine-3'-phosphate
  modified_base 19: mod_base = OTHER; note = 2'-O-methylguanosine-3'-phosphate
  modified_base 20: mod_base = OTHER; note = 2'-O-methyladenosine-3'-phosphate
  modified_base 21: mod_base = OTHER; note = 2'-O-methylcytidine-3'-phosphorothioate
  modified_base 22: mod_base = OTHER; note = 2'-O-methyluridine-3'-phosphorothioate
  modified_base 23: mod_base = OTHER; note = 2'-O-methyladenosine
taaatgcatattttcacagacta

SEQ ID NO: 13369 - RNA, 23 nt, synthetic construct
  source 1..23: mol_type = other RNA
  modified_base 1: mod_base = OTHER; note = 2'-O-methyluridine-3'-phosphorothioate 5'-(E)-Vinylphosphonate
  modified_base 2: mod_base = OTHER; note = 2'-deoxy-2'-fluoroadenosine-3'-phosphorothioate
  modified_base 3: mod_base = OTHER; note = 2'-O-methyladenosine-3'-phosphate
  modified_base 4: mod_base = OTHER; note = 2'-O-methyladenosine-3'-phosphate
  modified_base 5: mod_base = OTHER; note = 2'-O-methyladenosine-3'-phosphate
  modified_base 6: mod_base = OTHER; note = 2'-deoxy-2'-fluorouridine-3'-phosphate
  modified_base 7: mod_base = OTHER; note = 2'-O-methylguanosine-3'-phosphate
  modified_base 8: mod_base = OTHER; note = 2'-O-methylcytidine-3'-phosphate
  modified_base 9: mod_base = OTHER; note = 2'-O-methyladenosine-3'-phosphate
  modified_base 10: mod_base = OTHER; note = 2'-O-methyluridine-3'-phosphate
  modified_base 11: mod_base = OTHER; note = 2'-O-methyladenosine-3'-phosphate
  modified_base 12: mod_base = OTHER; note = 2'-O-methyluridine-3'-phosphate
  modified_base 13: mod_base = OTHER; note = 2'-O-methyluridine-3'-phosphate
  modified_base 14: mod_base = OTHER; note = 2'-deoxy-2'-fluorouridine-3'-phosphate
  modified_base 15: mod_base = OTHER; note = 2'-O-methyluridine-3'-phosphate
  modified_base 16: mod_base = OTHER; note = 2'-deoxy-2'-fluorocytidine-3'-phosphate
  modified_base 17: mod_base = OTHER; note = 2'-O-methyladenosine-3'-phosphate
  modified_base 18: mod_base = OTHER; note = 2'-O-methylcytidine-3'-phosphate
  modified_base 19: mod_base = OTHER; note = 2'-O-methyladenosine-3'-phosphate
  modified_base 20: mod_base = OTHER; note = 2'-O-methylguanosine-3'-phosphate
  modified_base 21: mod_base = OTHER; note = 2'-O-methyladenosine-3'-phosphorothioate
  modified_base 22: mod_base = OTHER; note = 2'-O-methylcytidine-3'-phosphorothioate
  modified_base 23: mod_base = OTHER; note = 2'-O-methyluridine
taaaatgcatattttcacagact

SEQ ID NO: 13370 - RNA, 23 nt, synthetic construct
  source 1..23: mol_type = other RNA
  modified_base 1: mod_base = OTHER; note = 2'-O-methyluridine-3'-phosphorothioate 5'-(E)-Vinylphosphonate
  modified_base 2: mod_base = OTHER; note = 2'-deoxy-2'-fluorouridine-3'-phosphorothioate
  modified_base 3: mod_base = OTHER; note = 2'-O-methyladenosine-3'-phosphate
  modified_base 4: mod_base = OTHER; note = 2'-O-methyladenosine-3'-phosphate
  modified_base 5: mod_base = OTHER; note = 2'-O-methyladenosine-3'-phosphate
  modified_base 6: mod_base = OTHER; note = 2'-deoxy-2'-fluoroadenosine-3'-phosphate
  modified_base 7: mod_base = OTHER; note = 2'-O-methyluridine-3'-phosphate
  modified_base 8: mod_base = OTHER; note = 2'-O-methylguanosine-3'-phosphate
  modified_base 9: mod_base = OTHER; note = 2'-O-methylcytidine-3'-phosphate
  modified_base 10: mod_base = OTHER; note = 2'-O-methyladenosine-3'-phosphate
  modified_base 11: mod_base = OTHER; note = 2'-O-methyluridine-3'-phosphate
  modified_base 12: mod_base = OTHER; note = 2'-O-methyladenosine-3'-phosphate
  modified_base 13: mod_base = OTHER; note = 2'-O-methyluridine-3'-phosphate
  modified_base 14: mod_base = OTHER; note = 2'-deoxy-2'-fluorouridine-3'-phosphate
  modified_base 15: mod_base = OTHER; note = 2'-O-methyluridine-3'-phosphate
  modified_base 16: mod_base = OTHER; note = 2'-deoxy-2'-fluorouridine-3'-phosphate
  modified_base 17: mod_base = OTHER; note = 2'-O-methylcytidine-3'-phosphate
  modified_base 18: mod_base = OTHER; note = 2'-O-methyladenosine-3'-phosphate
  modified_base 19: mod_base = OTHER; note = 2'-O-methylcytidine-3'-phosphate
  modified_base 20: mod_base = OTHER; note = 2'-O-methyladenosine-3'-phosphate
  modified_base 21: mod_base = OTHER; note = 2'-O-methylguanosine-3'-phosphorothioate
  modified_base 22: mod_base = OTHER; note = 2'-O-methyladenosine-3'-phosphorothioate
  modified_base 23: mod_base = OTHER; note = 2'-O-methylcytidine
ttaaaatgcatattttcacagac

SEQ ID NO: 13371 - RNA, 23 nt, synthetic construct
  source 1..23: mol_type = other RNA
  modified_base 1: mod_base = OTHER; note = 2'-O-methyluridine-3'-phosphorothioate 5'-(E)-Vinylphosphonate
  modified_base 2: mod_base = OTHER; note = 2'-deoxy-2'-fluoroadenosine-3'-phosphorothioate
  modified_base 3: mod_base = OTHER; note = 2'-O-methyluridine-3'-phosphate
  modified_base 4: mod_base = OTHER; note = 2'-O-methyluridine-3'-phosphate
  modified_base 5: mod_base = OTHER; note = 2'-O-methyluridine-3'-phosphate
  modified_base 6: mod_base = OTHER; note = 2'-deoxy-2'-fluorouridine-3'-phosphate
  modified_base 7: mod_base = OTHER; note = 2'-O-methylguanosine-3'-phosphate
  modified_base 8: mod_base = OTHER; note = 2'-O-methylguanosine-3'-phosphate
  modified_base 9: mod_base = OTHER; note = 2'-O-methyluridine-3'-phosphate
  modified_base 10: mod_base = OTHER; note = 2'-O-methyladenosine-3'-phosphate
  modified_base 11: mod_base = OTHER; note = 2'-O-methyluridine-3'-phosphate
  modified_base 12: mod_base = OTHER; note = 2'-O-methyladenosine-3'-phosphate
  modified_base 13: mod_base = OTHER; note = 2'-O-methyladenosine-3'-phosphate
  modified_base 14: mod_base = OTHER; note = 2'-deoxy-2'-fluoroadenosine-3'-phosphate
  modified_base 15: mod_base = OTHER; note = 2'-O-methylguanosine-3'-phosphate
  modified_base 16: mod_base = OTHER; note = 2'-deoxy-2'-fluoroguanosine-3'-phosphate
  modified_base 17: mod_base = OTHER; note = 2'-O-methylcytidine-3'-phosphate
  modified_base 18: mod_base = OTHER; note = 2'-O-methyluridine-3'-phosphate
  modified_base 19: mod_base = OTHER; note = 2'-O-methyladenosine-3'-phosphate
  modified_base 20: mod_base = OTHER; note = 2'-O-methyluridine-3'-phosphate
  modified_base 21: mod_base = OTHER; note = 2'-O-methylcytidine-3'-phosphorothioate
  modified_base 22: mod_base = OTHER; note = 2'-O-methyladenosine-3'-phosphorothioate
  modified_base 23: mod_base = OTHER; note = 2'-O-methylcytidine
tattttggtataaaggctatcac

SEQ ID NO: 13372 - RNA, 23 nt, synthetic construct
  source 1..23: mol_type = other RNA
  modified_base 1: mod_base = OTHER; note = 2'-O-methyluridine-3'-phosphorothioate 5'-(E)-Vinylphosphonate
  modified_base 2: mod_base = OTHER; note = 2'-deoxy-2'-fluoroadenosine-3'-phosphorothioate
  modified_base 3: mod_base = OTHER; note = 2'-O-methylcytidine-3'-phosphate
  modified_base 4: mod_base = OTHER; note = 2'-O-methyluridine-3'-phosphate
  modified_base 5: mod_base = OTHER; note = 2'-O-methyluridine-3'-phosphate
  modified_base 6: mod_base = OTHER; note = 2'-deoxy-2'-fluorouridine-3'-phosphate
  modified_base 7: mod_base = OTHER; note = 2'-O-methyluridine-3'-phosphate
  modified_base 8: mod_base = OTHER; note = 2'-O-methyladenosine-3'-phosphate
  modified_base 9: mod_base = OTHER; note = 2'-O-methyluridine-3'-phosphate
  modified_base 10: mod_base = OTHER; note = 2'-O-methylguanosine-3'-phosphate
  modified_base 11: mod_base = OTHER; note = 2'-O-methyladenosine-3'-phosphate
  modified_base 12: mod_base = OTHER; note = 2'-O-methylcytidine-3'-phosphate
  modified_base 13: mod_base = OTHER; note = 2'-O-methyluridine-3'-phosphate
  modified_base 14: mod_base = OTHER; note = 2'-deoxy-2'-fluorouridine-3'-phosphate
  modified_base 15: mod_base = OTHER; note = 2'-O-methylguanosine-3'-phosphate
  modified_base 16: mod_base = OTHER; note = 2'-deoxy-2'-fluorocytidine-3'-phosphate
  modified_base 17: mod_base = OTHER; note = 2'-O-methyluridine-3'-phosphate
  modified_base 18: mod_base = OTHER; note = 2'-O-methylguanosine-3'-phosphate
  modified_base 19: mod_base = OTHER; note = 2'-O-methyluridine-3'-phosphate
  modified_base 20: mod_base = OTHER; note = 2'-O-methyluridine-3'-phosphate
  modified_base 21: mod_base = OTHER; note = 2'-O-methylguanosine-3'-phosphorothioate
  modified_base 22: mod_base = OTHER; note = 2'-O-methylguanosine-3'-phosphorothioate
  modified_base 23: mod_base = OTHER; note = 2'-O-methyluridine
tacttttatgacttgctgttggt

SEQ ID NO: 13373 - RNA, 23 nt, synthetic construct
  source 1..23: mol_type = other RNA
  modified_base 1: mod_base = OTHER; note = 2'-O-methyluridine-3'-phosphorothioate 5'-(E)-Vinylphosphonate
  modified_base 2: mod_base = OTHER; note = 2'-deoxy-2'-fluorouridine-3'-phosphorothioate
  modified_base 3: mod_base = OTHER; note = 2'-O-methyladenosine-3'-phosphate
  modified_base 4: mod_base = OTHER; note = 2'-O-methylcytidine-3'-phosphate
  modified_base 5: mod_base = OTHER; note = 2'-O-methyluridine-3'-phosphate
  modified_base 6: mod_base = OTHER; note = 2'-deoxy-2'-fluorouridine-3'-phosphate
  modified_base 7: mod_base = OTHER; note = 2'-O-methyluridine-3'-phosphate
  modified_base 8: mod_base = OTHER; note = 2'-O-methyluridine-3'-phosphate
  modified_base 9: mod_base = OTHER; note = 2'-O-methyladenosine-3'-phosphate
  modified_base 10: mod_base = OTHER; note = 2'-O-methyluridine-3'-phosphate
  modified_base 11: mod_base = OTHER; note = 2'-O-methylguanosine-3'-phosphate
  modified_base 12: mod_base = OTHER; note = 2'-O-methyladenosine-3'-phosphate
  modified_base 13: mod_base = OTHER; note = 2'-O-methylcytidine-3'-phosphate
  modified_base 14: mod_base = OTHER; note = 2'-deoxy-2'-fluorouridine-3'-phosphate
  modified_base 15: mod_base = OTHER; note = 2'-O-methyluridine-3'-phosphate
  modified_base 16: mod_base = OTHER; note = 2'-deoxy-2'-fluoroguanosine-3'-phosphate
  modified_base 17: mod_base = OTHER; note = 2'-O-methylcytidine-3'-phosphate
  modified_base 18: mod_base = OTHER; note = 2'-O-methyluridine-3'-phosphate
  modified_base 19: mod_base = OTHER; note = 2'-O-methylguanosine-3'-phosphate
  modified_base 20: mod_base = OTHER; note = 2'-O-methyluridine-3'-phosphate
  modified_base 21: mod_base = OTHER; note = 2'-O-methyluridine-3'-phosphorothioate
  modified_base 22: mod_base = OTHER; note = 2'-O-methylguanosine-3'-phosphorothioate
  modified_base 23: mod_base = OTHER; note = 2'-O-methylguanosine
ttacttttatgacttgctgttgg

SEQ ID NO: 13374 - RNA, 23 nt, synthetic construct
  source 1..23: mol_type = other RNA
  modified_base 1: mod_base = OTHER; note = 2'-O-methyluridine-3'-phosphorothioate 5'-(E)-Vinylphosphonate
  modified_base 2: mod_base = OTHER; note = 2'-deoxy-2'-fluoroadenosine-3'-phosphorothioate
  modified_base 3: mod_base = OTHER; note = 2'-O-methyluridine-3'-phosphate
  modified_base 4: mod_base = OTHER; note = 2'-O-methyladenosine-3'-phosphate
  modified_base 5: mod_base = OTHER; note = 2'-O-methylcytidine-3'-phosphate
  modified_base 6: mod_base = OTHER; note = 2'-deoxy-2'-fluorouridine-3'-phosphate
  modified_base 7: mod_base = OTHER; note = 2'-O-methyluridine-3'-phosphate
  modified_base 8: mod_base = OTHER; note = 2'-O-methyluridine-3'-phosphate
  modified_base 9: mod_base = OTHER; note = 2'-O-methyluridine-3'-phosphate
  modified_base 10: mod_base = OTHER; note = 2'-O-methyladenosine-3'-phosphate
  modified_base 11: mod_base = OTHER; note = 2'-O-methyluridine-3'-phosphate
  modified_base 12: mod_base = OTHER; note = 2'-O-methylguanosine-3'-phosphate
  modified_base 13: mod_base = OTHER; note = 2'-O-methyladenosine-3'-phosphate
  modified_base 14: mod_base = OTHER; note = 2'-deoxy-2'-fluorocytidine-3'-phosphate
  modified_base 15: mod_base = OTHER; note = 2'-O-methyluridine-3'-phosphate
  modified_base 16: mod_base = OTHER; note = 2'-deoxy-2'-fluorouridine-3'-phosphate
  modified_base 17: mod_base = OTHER; note = 2'-O-methylguanosine-3'-phosphate
  modified_base 18: mod_base = OTHER; note = 2'-O-methylcytidine-3'-phosphate
  modified_base 19: mod_base = OTHER; note = 2'-O-methyluridine-3'-phosphate
  modified_base 20: mod_base = OTHER; note = 2'-O-methylguanosine-3'-phosphate
  modified_base 21: mod_base = OTHER; note = 2'-O-methyluridine-3'-phosphorothioate
  modified_base 22: mod_base = OTHER; note = 2'-O-methyluridine-3'-phosphorothioate
  modified_base 23: mod_base = OTHER; note = 2'-O-methylguanosine
tatacttttatgacttgctgttg

SEQ ID NO: 13375 - RNA, 23 nt, synthetic construct
  source 1..23: mol_type = other RNA
  modified_base 1: mod_base = OTHER; note = 2'-O-methyluridine-3'-phosphorothioate 5'-(E)-Vinylphosphonate
  modified_base 2: mod_base = OTHER; note = 2'-deoxy-2'-fluoroadenosine-3'-phosphorothioate
  modified_base 3: mod_base = OTHER; note = 2'-O-methyladenosine-3'-phosphate
  modified_base 4: mod_base = OTHER; note = 2'-O-methyluridine-3'-phosphate
  modified_base 5: mod_base = OTHER; note = 2'-O-methyladenosine-3'-phosphate
  modified_base 6: mod_base = OTHER; note = 2'-deoxy-2'-fluorocytidine-3'-phosphate
  modified_base 7: mod_base = OTHER; note = 2'-O-methyluridine-3'-phosphate
  modified_base 8: mod_base = OTHER; note = 2'-O-methyluridine-3'-phosphate
  modified_base 9: mod_base = OTHER; note = 2'-O-methyluridine-3'-phosphate
  modified_base 10: mod_base = OTHER; note = 2'-O-methyluridine-3'-phosphate
  modified_base 11: mod_base = OTHER; note = 2'-O-methyladenosine-3'-phosphate
  modified_base 12: mod_base = OTHER; note = 2'-O-methyluridine-3'-phosphate
  modified_base 13: mod_base = OTHER; note = 2'-O-methylguanosine-3'-phosphate
  modified_base 14: mod_base = OTHER; note = 2'-deoxy-2'-fluoroadenosine-3'-phosphate
  modified_base 15: mod_base = OTHER; note = 2'-O-methylcytidine-3'-phosphate
  modified_base 16: mod_base = OTHER; note = 2'-deoxy-2'-fluorouridine-3'-phosphate
  modified_base 17: mod_base = OTHER; note = 2'-O-methyluridine-3'-phosphate
  modified_base 18: mod_base = OTHER; note = 2'-O-methylguanosine-3'-phosphate
  modified_base 19: mod_base = OTHER; note = 2'-O-methylcytidine-3'-phosphate
  modified_base 20: mod_base = OTHER; note = 2'-O-methyluridine-3'-phosphate
  modified_base 21: mod_base = OTHER; note = 2'-O-methylguanosine-3'-phosphorothioate
  modified_base 22: mod_base = OTHER; note = 2'-O-methyluridine-3'-phosphorothioate
  modified_base 23: mod_base = OTHER; note = 2'-O-methyluridine
taatacttttatgacttgctgtt

SEQ ID NO: 13376 - RNA, 23 nt, synthetic construct
  source 1..23: mol_type = other RNA
  modified_base 1: mod_base = OTHER; note = 2'-O-methyluridine-3'-phosphorothioate 5'-(E)-Vinylphosphonate
  modified_base 2: mod_base = OTHER; note = 2'-deoxy-2'-fluoroadenosine-3'-phosphorothioate
  modified_base 3: mod_base = OTHER; note = 2'-O-methyladenosine-3'-phosphate
  modified_base 4: mod_base = OTHER; note = 2'-O-methyladenosine-3'-phosphate
  modified_base 5: mod_base = OTHER; note = 2'-O-methyluridine-3'-phosphate
  modified_base 6: mod_base = OTHER; note = 2'-deoxy-2'-fluoroadenosine-3'-phosphate
  modified_base 7: mod_base = OTHER; note = 2'-O-methylcytidine-3'-phosphate
  modified_base 8: mod_base = OTHER; note = 2'-O-methyluridine-3'-phosphate
  modified_base 9: mod_base = OTHER; note = 2'-O-methyluridine-3'-phosphate
  modified_base 10: mod_base = OTHER; note = 2'-O-methyluridine-3'-phosphate
  modified_base 11: mod_base = OTHER; note = 2'-O-methyluridine-3'-phosphate
  modified_base 12: mod_base = OTHER; note = 2'-O-methyladenosine-3'-phosphate
  modified_base 13: mod_base = OTHER; note = 2'-O-methyluridine-3'-phosphate
  modified_base 14: mod_base = OTHER; note = 2'-deoxy-2'-fluoroguanosine-3'-phosphate
  modified_base 15: mod_base = OTHER; note = 2'-O-methyladenosine-3'-phosphate
  modified_base 16: mod_base = OTHER; note = 2'-deoxy-2'-fluorocytidine-3'-phosphate
  modified_base 17: mod_base = OTHER; note = 2'-O-methyluridine-3'-phosphate
  modified_base 18: mod_base = OTHER; note = 2'-O-methyluridine-3'-phosphate
  modified_base 19: mod_base = OTHER; note = 2'-O-methylguanosine-3'-phosphate
  modified_base 20: mod_base = OTHER; note = 2'-O-methylcytidine-3'-phosphate
  modified_base 21: mod_base = OTHER; note = 2'-O-methyluridine-3'-phosphorothioate
  modified_base 22: mod_base = OTHER; note = 2'-O-methylguanosine-3'-phosphorothioate
  modified_base 23: mod_base = OTHER; note = 2'-O-methyluridine
taaatacttttatgacttgctgt

SEQ ID NO: 13377 - RNA, 23 nt, synthetic construct
  source 1..23: mol_type = other RNA
  modified_base 1: mod_base = OTHER; note = 2'-O-methyluridine-3'-phosphorothioate 5'-(E)-Vinylphosphonate
  modified_base 2: mod_base = OTHER; note = 2'-deoxy-2'-fluorouridine-3'-phosphorothioate
  modified_base 3: mod_base = OTHER; note = 2'-O-methyladenosine-3'-phosphate
  modified_base 4: mod_base = OTHER; note = 2'-O-methyladenosine-3'-phosphate
  modified_base 5: mod_base = OTHER; note = 2'-O-methyladenosine-3'-phosphate
  modified_base 6: mod_base = OTHER; note = 2'-deoxy-2'-fluorouridine-3'-phosphate
  modified_base 7: mod_base = OTHER; note = 2'-O-methyladenosine-3'-phosphate
  modified_base 8: mod_base = OTHER; note = 2'-O-methylcytidine-3'-phosphate
  modified_base 9: mod_base = OTHER; note = 2'-O-methyluridine-3'-phosphate
  modified_base 10: mod_base = OTHER; note = 2'-O-methyluridine-3'-phosphate
  modified_base 11: mod_base = OTHER; note = 2'-O-methyluridine-3'-phosphate
  modified_base 12: mod_base = OTHER; note = 2'-O-methyluridine-3'-phosphate
  modified_base 13: mod_base = OTHER; note = 2'-O-methyladenosine-3'-phosphate
  modified_base 14: mod_base = OTHER; note = 2'-deoxy-2'-fluorouridine-3'-phosphate
  modified_base 15: mod_base = OTHER; note = 2'-O-methylguanosine-3'-phosphate
  modified_base 16: mod_base = OTHER; note = 2'-deoxy-2'-fluoroadenosine-3'-phosphate
  modified_base 17: mod_base = OTHER; note = 2'-O-methylcytidine-3'-phosphate
  modified_base 18: mod_base = OTHER; note = 2'-O-methyluridine-3'-phosphate
  modified_base 19: mod_base = OTHER; note = 2'-O-methyluridine-3'-phosphate
  modified_base 20: mod_base = OTHER; note = 2'-O-methylguanosine-3'-phosphate
  modified_base 21: mod_base = OTHER; note = 2'-O-methylcytidine-3'-phosphorothioate
  modified_base 22: mod_base = OTHER; note = 2'-O-methyluridine-3'-phosphorothioate
  modified_base 23: mod_base = OTHER; note = 2'-O-methylguanosine
ttaaatacttttatgacttgctg

SEQ ID NO: 13378 - RNA, 23 nt, synthetic construct
  source 1..23: mol_type = other RNA
  modified_base 1: mod_base = OTHER; note = 2'-O-methyluridine-3'-phosphorothioate 5'-(E)-Vinylphosphonate
  modified_base 2: mod_base = OTHER; note = 2'-deoxy-2'-fluoroadenosine-3'-phosphorothioate
  modified_base 3: mod_base = OTHER; note = 2'-O-methyladenosine-3'-phosphate
  modified_base 4: mod_base = OTHER; note = 2'-O-methyluridine-3'-phosphate
  modified_base 5: mod_base = OTHER; note = 2'-O-methyluridine-3'-phosphate
  modified_base 6: mod_base = OTHER; note = 2'-deoxy-2'-fluoroadenosine-3'-phosphate
  modified_base 7: mod_base = OTHER; note = 2'-O-methyluridine-3'-phosphate
  modified_base 8: mod_base = OTHER; note = 2'-O-methyluridine-3'-phosphate
  modified_base 9: mod_base = OTHER; note = 2'-O-methyluridine-3'-phosphate
  modified_base 10: mod_base = OTHER; note = 2'-O-methyladenosine-3'-phosphate
  modified_base 11: mod_base = OTHER; note = 2'-O-methylcytidine-3'-phosphate
  modified_base 12: mod_base = OTHER; note = 2'-O-methyladenosine-3'-phosphate
  modified_base 13: mod_base = OTHER; note = 2'-O-methyluridine-3'-phosphate
  modified_base 14: mod_base = OTHER; note = 2'-deoxy-2'-fluorocytidine-3'-phosphate
  modified_base 15: mod_base = OTHER; note = 2'-O-methyluridine-3'-phosphate
  modified_base 16: mod_base = OTHER; note = 2'-deoxy-2'-fluoroguanosine-3'-phosphate
  modified_base 17: mod_base = OTHER; note = 2'-O-methyladenosine-3'-phosphate
  modified_base 18: mod_base = OTHER; note = 2'-O-methyladenosine-3'-phosphate
  modified_base 19: mod_base = OTHER; note = 2'-O-methylguanosine-3'-phosphate
  modified_base 20: mod_base = OTHER; note = 2'-O-methyladenosine-3'-phosphate
  modified_base 21: mod_base = OTHER; note = 2'-O-methylcytidine-3'-phosphorothioate
  modified_base 22: mod_base = OTHER; note = 2'-O-methyladenosine-3'-phosphorothioate
  modified_base 23: mod_base = OTHER; note = 2'-O-methylguanosine
taattatttacatctgaagacag

SEQ ID NO: 13379 - RNA, 23 nt, synthetic construct
  source 1..23: mol_type = other RNA
  modified_base 1: mod_base = OTHER; note = 2'-O-methyluridine-3'-phosphorothioate 5'-(E)-Vinylphosphonate
  modified_base 2: mod_base = OTHER; note = 2'-deoxy-2'-fluorocytidine-3'-phosphorothioate
  modified_base 3: mod_base = OTHER; note = 2'-O-methyladenosine-3'-phosphate
  modified_base 4: mod_base = OTHER; note = 2'-O-methyladenosine-3'-phosphate
  modified_base 5: mod_base = OTHER; note = 2'-O-methyluridine-3'-phosphate
  modified_base 6: mod_base = OTHER; note = 2'-deoxy-2'-fluoroadenosine-3'-phosphate
  modified_base 7: mod_base = OTHER; note = 2'-O-methylcytidine-3'-phosphate
  modified_base 8: mod_base = OTHER; note = 2'-O-methyladenosine-3'-phosphate
  modified_base 9: mod_base = OTHER; note = 2'-O-methyluridine-3'-phosphate
  modified_base 10: mod_base = OTHER; note = 2'-O-methyluridine-3'-phosphate
  modified_base 11: mod_base = OTHER; note = 2'-O-methyluridine-3'-phosphate
  modified_base 12: mod_base = OTHER; note = 2'-O-methyluridine-3'-phosphate
  modified_base 13: mod_base = OTHER; note = 2'-O-methylcytidine-3'-phosphate
  modified_base 14: mod_base = OTHER; note = 2'-deoxy-2'-fluoroadenosine-3'-phosphate
  modified_base 15: mod_base = OTHER; note = 2'-O-methylguanosine-3'-phosphate
  modified_base 16: mod_base = OTHER; note = 2'-deoxy-2'-fluoroadenosine-3'-phosphate
  modified_base 17: mod_base = OTHER; note = 2'-O-methyladenosine-3'-phosphate
  modified_base 18: mod_base = OTHER; note = 2'-O-methyladenosine-3'-phosphate
  modified_base 19: mod_base = OTHER; note = 2'-O-methyladenosine-3'-phosphate
  modified_base 20: mod_base = OTHER; note = 2'-O-methyluridine-3'-phosphate
  modified_base 21: mod_base = OTHER; note = 2'-O-methylguanosine-3'-phosphorothioate
  modified_base 22: mod_base = OTHER; note = 2'-O-methylcytidine-3'-phosphorothioate
  modified_base 23: mod_base = OTHER; note = 2'-O-methyladenosine
tcaatacattttcagaaaatgca

SEQ ID NO: 13380 - RNA, 23 nt, synthetic construct
  source 1..23: mol_type = other RNA
  modified_base 1: mod_base = OTHER; note = 2'-O-methyluridine-3'-phosphorothioate 5'-(E)-Vinylphosphonate
  modified_base 2: mod_base = OTHER; note = 2'-deoxy-2'-fluoroadenosine-3'-phosphorothioate
  modified_base 3: mod_base = OTHER; note = 2'-O-methyladenosine-3'-phosphate
  modified_base 4: mod_base = OTHER; note = 2'-O-methyluridine-3'-phosphate
  modified_base 5: mod_base = OTHER; note = 2'-O-methyladenosine-3'-phosphate
  modified_base 6: mod_base = OTHER; note = 2'-deoxy-2'-fluoroguanosine-3'-phosphate
  modified_base 7: mod_base = OTHER; note = 2'-O-methyladenosine-3'-phosphate
  modified_base 8: mod_base = OTHER; note = 2'-O-methylguanosine-3'-phosphate
  modified_base 9: mod_base = OTHER; note = 2'-O-methyluridine-3'-phosphate
  modified_base 10: mod_base = OTHER; note = 2'-O-methyluridine-3'-phosphate
  modified_base 11: mod_base = OTHER; note = 2'-O-methylcytidine-3'-phosphate
  modified_base 12: mod_base = OTHER; note = 2'-O-methyluridine-3'-phosphate
  modified_base 13: mod_base = OTHER; note = 2'-O-methyladenosine-3'-phosphate
  modified_base 14: mod_base = OTHER; note = 2'-deoxy-2'-fluorouridine-3'-phosphate
  modified_base 15: mod_base = OTHER; note = 2'-O-methyladenosine-3'-phosphate
  modified_base 16: mod_base = OTHER; note = 2'-deoxy-2'-fluorouridine-3'-phosphate
  modified_base 17: mod_base = OTHER; note = 2'-O-methylguanosine-3'-phosphate
  modified_base 18: mod_base = OTHER; note = 2'-O-methylcytidine-3'-phosphate
  modified_base 19: mod_base = OTHER; note = 2'-O-methyluridine-3'-phosphate
  modified_base 20: mod_base = OTHER; note = 2'-O-methyluridine-3'-phosphate
  modified_base 21: mod_base = OTHER; note = 2'-O-methylcytidine-3'-phosphorothioate
  modified_base 22: mod_base = OTHER; note = 2'-O-methyladenosine-3'-phosphorothioate
  modified_base 23: mod_base = OTHER; note = 2'-O-methylcytidine
taatagagttctatatgcttcac

SEQ ID NO: 13381 - RNA, 23 nt, synthetic construct
  source 1..23: mol_type = other RNA
  modified_base 1: mod_base = OTHER; note = 2'-O-methyluridine-3'-phosphorothioate 5'-(E)-Vinylphosphonate
  modified_base 2: mod_base = OTHER; note = 2'-deoxy-2'-fluoroguanosine-3'-phosphorothioate
  modified_base 3: mod_base = OTHER; note = 2'-O-methyladenosine-3'-phosphate
  modified_base 4: mod_base = OTHER; note = 2'-O-methylguanosine-3'-phosphate
  modified_base 5: mod_base = OTHER; note = 2'-O-methyluridine-3'-phosphate
  modified_base 6: mod_base = OTHER; note = 2'-deoxy-2'-fluorouridine-3'-phosphate
  modified_base 7: mod_base = OTHER; note = 2'-O-methylcytidine-3'-phosphate
  modified_base 8: mod_base = OTHER; note = 2'-O-methyluridine-3'-phosphate
  modified_base 9: mod_base = OTHER; note = 2'-O-methyladenosine-3'-phosphate
  modified_base 10: mod_base = OTHER; note = 2'-O-methyluridine-3'-phosphate
  modified_base 11: mod_base = OTHER; note = 2'-O-methyladenosine-3'-phosphate
  modified_base 12: mod_base = OTHER; note = 2'-O-methyluridine-3'-phosphate
  modified_base 13: mod_base = OTHER; note = 2'-O-methylguanosine-3'-phosphate
  modified_base 14: mod_base = OTHER; note = 2'-deoxy-2'-fluorocytidine-3'-phosphate
  modified_base 15: mod_base = OTHER; note = 2'-O-methyluridine-3'-phosphate
  modified_base 16: mod_base = OTHER; note = 2'-deoxy-2'-fluorouridine-3'-phosphate
  modified_base 17: mod_base = OTHER; note = 2'-O-methylcytidine-3'-phosphate
  modified_base 18: mod_base = OTHER; note = 2'-O-methyladenosine-3'-phosphate
  modified_base 19: mod_base = OTHER; note = 2'-O-methylcytidine-3'-phosphate
  modified_base 20: mod_base = OTHER; note = 2'-O-methyladenosine-3'-phosphate
  modified_base 21: mod_base = OTHER; note = 2'-O-methylguanosine-3'-phosphorothioate
  modified_base 22: mod_base = OTHER; note = 2'-O-methyladenosine-3'-phosphorothioate
  modified_base 23: mod_base = OTHER; note = 2'-O-methyladenosine
tgagttctatatgcttcacagaa

SEQ ID NO: 13382 - RNA, 23 nt, synthetic construct
  source 1..23: mol_type = other RNA
  modified_base 1: mod_base = OTHER; note = 2'-O-methyluridine-3'-phosphorothioate 5'-(E)-Vinylphosphonate
  modified_base 2: mod_base = OTHER; note = 2'-deoxy-2'-fluoroadenosine-3'-phosphorothioate
  modified_base 3: mod_base = OTHER; note = 2'-O-methylguanosine-3'-phosphate
  modified_base 4: mod_base = OTHER; note = 2'-O-methyladenosine-3'-phosphate
  modified_base 5: mod_base = OTHER; note = 2'-O-methylguanosine-3'-phosphate
  modified_base 6: mod_base = OTHER; note = 2'-deoxy-2'-fluorouridine-3'-phosphate
  modified_base 7: mod_base = OTHER; note = 2'-O-methyluridine-3'-phosphate
  modified_base 8: mod_base = OTHER; note = 2'-O-methylcytidine-3'-phosphate
  modified_base 9: mod_base = OTHER; note = 2'-O-methyluridine-3'-phosphate
  modified_base 10: mod_base = OTHER; note = 2'-O-methyladenosine-3'-phosphate
  modified_base 11: mod_base = OTHER; note = 2'-O-methyluridine-3'-phosphate
  modified_base 12: mod_base = OTHER; note = 2'-O-methyladenosine-3'-phosphate
  modified_base 13: mod_base = OTHER; note = 2'-O-methyluridine-3'-phosphate
  modified_base 14: mod_base = OTHER; note = 2'-deoxy-2'-fluoroguanosine-3'-phosphate
  modified_base 15: mod_base = OTHER; note = 2'-O-methylcytidine-3'-phosphate
  modified_base 16: mod_base = OTHER; note = 2'-deoxy-2'-fluorouridine-3'-phosphate
  modified_base 17: mod_base = OTHER; note = 2'-O-methyluridine-3'-phosphate
  modified_base 18: mod_base = OTHER; note = 2'-O-methylcytidine-3'-phosphate
  modified_base 19: mod_base = OTHER; note = 2'-O-methyladenosine-3'-phosphate
  modified_base 20: mod_base = OTHER; note = 2'-O-methylcytidine-3'-phosphate
  modified_base 21: mod_base = OTHER; note = 2'-O-methyladenosine-3'-phosphorothioate
  modified_base 22: mod_base = OTHER; note = 2'-O-methylguanosine-3'-phosphorothioate
  modified_base 23: mod_base = OTHER; note = 2'-O-methyladenosine
tagagttctatatgcttcacaga

SEQ ID NO: 13383 - RNA, 23 nt, synthetic construct
  source 1..23: mol_type = other RNA
  modified_base 1: mod_base = OTHER; note = 2'-O-methyluridine-3'-phosphorothioate 5'-(E)-Vinylphosphonate
  modified_base 2: mod_base = OTHER; note = 2'-deoxy-2'-fluorouridine-3'-phosphorothioate
  modified_base 3: mod_base = OTHER; note = 2'-O-methyladenosine-3'-phosphate
  modified_base 4: mod_base = OTHER; note = 2'-O-methylguanosine-3'-phosphate
  modified_base 5: mod_base = OTHER; note = 2'-O-methyladenosine-3'-phosphate
  modified_base 6: mod_base = OTHER; note = 2'-deoxy-2'-fluoroguanosine-3'-phosphate
  modified_base 7: mod_base = OTHER; note = 2'-O-methyluridine-3'-phosphate
  modified_base 8: mod_base = OTHER; note = 2'-O-methyluridine-3'-phosphate
  modified_base 9: mod_base = OTHER; note = 2'-O-methylcytidine-3'-phosphate
  modified_base 10: mod_base = OTHER; note = 2'-O-methyluridine-3'-phosphate
  modified_base 11: mod_base = OTHER; note = 2'-O-methyladenosine-3'-phosphate
  modified_base 12: mod_base = OTHER; note = 2'-O-methyluridine-3'-phosphate
  modified_base 13: mod_base = OTHER; note = 2'-O-methyladenosine-3'-phosphate
  modified_base 14: mod_base = OTHER; note = 2'-deoxy-2'-fluorouridine-3'-phosphate
  modified_base 15: mod_base = OTHER; note = 2'-O-methylguanosine-3'-phosphate
  modified_base 16: mod_base = OTHER; note = 2'-deoxy-2'-fluorocytidine-3'-phosphate
  modified_base 17: mod_base = OTHER; note = 2'-O-methyluridine-3'-phosphate
  modified_base 18: mod_base = OTHER; note = 2'-O-methyluridine-3'-phosphate
  modified_base 19: mod_base = OTHER; note = 2'-O-methylcytidine-3'-phosphate
  modified_base 20: mod_base = OTHER; note = 2'-O-methyladenosine-3'-phosphate
  modified_base 21: mod_base = OTHER; note = 2'-O-methylcytidine-3'-phosphorothioate
  modified_base 22: mod_base = OTHER; note = 2'-O-methyladenosine-3'-phosphorothioate
  modified_base 23: mod_base = OTHER; note = 2'-O-methylguanosine
ttagagttctatatgcttcacag

SEQ ID NO: 13384 - RNA, 23 nt, synthetic construct
  source 1..23: mol_type = other RNA
  modified_base 1: mod_base = OTHER; note = 2'-O-methyluridine-3'-phosphorothioate 5'-(E)-Vinylphosphonate
  modified_base 2: mod_base = OTHER; note = 2'-deoxy-2'-fluoroadenosine-3'-phosphorothioate
  modified_base 3: mod_base = OTHER; note = 2'-O-methyluridine-3'-phosphate
  modified_base 4: mod_base = OTHER; note = 2'-O-methyladenosine-3'-phosphate
  modified_base 5: mod_base = OTHER; note = 2'-O-methylguanosine-3'-phosphate
  modified_base 6: mod_base = OTHER; note = 2'-deoxy-2'-fluoroadenosine-3'-phosphate
  modified_base 7: mod_base = OTHER; note = 2'-O-methylguanosine-3'-phosphate
  modified_base 8: mod_base = OTHER; note = 2'-O-methyluridine-3'-phosphate
  modified_base 9: mod_base = OTHER; note = 2'-O-methyluridine-3'-phosphate
  modified_base 10: mod_base = OTHER; note = 2'-O-methylcytidine-3'-phosphate
  modified_base 11: mod_base = OTHER; note = 2'-O-methyluridine-3'-phosphate
  modified_base 12: mod_base = OTHER; note = 2'-O-methyladenosine-3'-phosphate
  modified_base 13: mod_base = OTHER; note = 2'-O-methyluridine-3'-phosphate
  modified_base 14: mod_base = OTHER; note = 2'-deoxy-2'-fluoroadenosine-3'-phosphate
  modified_base 15: mod_base = OTHER; note = 2'-O-methyluridine-3'-phosphate
  modified_base 16: mod_base = OTHER; note = 2'-deoxy-2'-fluoroguanosine-3'-phosphate
  modified_base 17: mod_base = OTHER; note = 2'-O-methylcytidine-3'-phosphate
  modified_base 18: mod_base = OTHER; note = 2'-O-methyluridine-3'-phosphate
  modified_base 19: mod_base = OTHER; note = 2'-O-methyluridine-3'-phosphate
  modified_base 20: mod_base = OTHER; note = 2'-O-methylcytidine-3'-phosphate
  modified_base 21: mod_base = OTHER; note = 2'-O-methyladenosine-3'-phosphorothioate
  modified_base 22: mod_base = OTHER; note = 2'-O-methylcytidine-3'-phosphorothioate
  modified_base 23: mod_base = OTHER; note = 2'-O-methyladenosine
tatagagttctatatgcttcaca

SEQ ID NO: 13385 - RNA, 23 nt, synthetic construct
  source 1..23: mol_type = other RNA
  modified_base 1: mod_base = OTHER; note = 2'-O-methyluridine-3'-phosphorothioate 5'-(E)-Vinylphosphonate
  modified_base 2: mod_base = OTHER; note = 2'-deoxy-2'-fluoroadenosine-3'-phosphorothioate
  modified_base 3: mod_base = OTHER; note = 2'-O-methyladenosine-3'-phosphate
  modified_base 4: mod_base = OTHER; note = 2'-O-methyladenosine-3'-phosphate
  modified_base 5: mod_base = OTHER; note = 2'-O-methyluridine-3'-phosphate
  modified_base 6: mod_base = OTHER; note = 2'-deoxy-2'-fluoroadenosine-3'-phosphate
  modified_base 7: mod_base = OTHER; note = 2'-O-methylguanosine-3'-phosphate
  modified_base 8: mod_base = OTHER; note = 2'-O-methyladenosine-3'-phosphate
  modified_base 9: mod_base = OTHER; note = 2'-O-methylguanosine-3'-phosphate
  modified_base 10: mod_base = OTHER; note = 2'-O-methyluridine-3'-phosphate
  modified_base 11: mod_base = OTHER; note = 2'-O-methyluridine-3'-phosphate
  modified_base 12: mod_base = OTHER; note = 2'-O-methylcytidine-3'-phosphate
  modified_base 13: mod_base = OTHER; note = 2'-O-methyluridine-3'-phosphate
  modified_base 14: mod_base = OTHER; note = 2'-deoxy-2'-fluoroadenosine-3'-phosphate
  modified_base 15: mod_base = OTHER; note = 2'-O-methyluridine-3'-phosphate
  modified_base 16: mod_base = OTHER; note = 2'-deoxy-2'-fluoroadenosine-3'-phosphate
  modified_base 17: mod_base = OTHER; note = 2'-O-methyluridine-3'-phosphate
  modified_base 18: mod_base = OTHER; note = 2'-O-methylguanosine-3'-phosphate
  modified_base 19: mod_base = OTHER; note = 2'-O-methylcytidine-3'-phosphate
  modified_base 20: mod_base = OTHER; note = 2'-O-methyluridine-3'-phosphate
  modified_base 21: mod_base = OTHER; note = 2'-O-methyluridine-3'-phosphorothioate
  modified_base 22: mod_base = OTHER; note = 2'-O-methylcytidine-3'-phosphorothioate
  modified_base 23: mod_base = OTHER; note = 2'-O-methyladenosine
taaatagagttctatatgcttca

SEQ ID NO: 13386 - RNA, 23 nt, synthetic construct
  source 1..23: mol_type = other RNA
  modified_base 1: mod_base = OTHER; note = 2'-O-methyluridine-3'-phosphorothioate 5'-(E)-Vinylphosphonate
  modified_base 2: mod_base = OTHER; note = 2'-deoxy-2'-fluoroadenosine-3'-phosphorothioate
  modified_base 3: mod_base = OTHER; note = 2'-O-methyladenosine-3'-phosphate
  modified_base 4: mod_base = OTHER; note = 2'-O-methyladenosine-3'-phosphate
  modified_base 5: mod_base = OTHER; note = 2'-O-methyladenosine-3'-phosphate
  modified_base 6: mod_base = OTHER; note = 2'-deoxy-2'-fluorouridine-3'-phosphate
  modified_base 7: mod_base = OTHER; note = 2'-O-methyladenosine-3'-phosphate
  modified_base 8: mod_base = OTHER; note = 2'-O-methylguanosine-3'-phosphate
  modified_base 9: mod_base = OTHER; note = 2'-O-methyladenosine-3'-phosphate
  modified_base 10: mod_base = OTHER; note = 2'-O-methylguanosine-3'-phosphate
  modified_base 11: mod_base = OTHER; note = 2'-O-methyluridine-3'-phosphate
  modified_base 12: mod_base = OTHER; note = 2'-O-methyluridine-3'-phosphate
  modified_base 13: mod_base = OTHER; note = 2'-O-methylcytidine-3'-phosphate
  modified_base 14: mod_base = OTHER; note = 2'-deoxy-2'-fluorouridine-3'-phosphate
  modified_base 15: mod_base = OTHER; note = 2'-O-methyladenosine-3'-phosphate
  modified_base 16: mod_base = OTHER; note = 2'-deoxy-2'-fluorouridine-3'-phosphate
  modified_base 17: mod_base = OTHER; note = 2'-O-methyladenosine-3'-phosphate
  modified_base 18: mod_base = OTHER; note = 2'-O-methyluridine-3'-phosphate
  modified_base 19: mod_base = OTHER; note = 2'-O-methylguanosine-3'-phosphate
  modified_base 20: mod_base = OTHER; note = 2'-O-methylcytidine-3'-phosphate
  modified_base 21: mod_base = OTHER; note = 2'-O-methyluridine-3'-phosphorothioate
  modified_base 22: mod_base = OTHER; note = 2'-O-methyluridine-3'-phosphorothioate
  modified_base 23: mod_base = OTHER; note = 2'-O-methylcytidine
taaaatagagttctatatgcttc

SEQ ID NO: 13387 - RNA, 23 nt, synthetic construct
  source 1..23: mol_type = other RNA
  modified_base 1: mod_base = OTHER; note = 2'-O-methyluridine-3'-phosphorothioate 5'-(E)-Vinylphosphonate
  modified_base 2: mod_base = OTHER; note = 2'-deoxy-2'-fluoroguanosine-3'-phosphorothioate
  modified_base 3: mod_base = OTHER; note = 2'-O-methyladenosine-3'-phosphate
  modified_base 4: mod_base = OTHER; note = 2'-O-methylcytidine-3'-phosphate
  modified_base 5: mod_base = OTHER; note = 2'-O-methyladenosine-3'-phosphate
  modified_base 6: mod_base = OTHER; note = 2'-deoxy-2'-fluorocytidine-3'-phosphate
  modified_base 7: mod_base = OTHER; note = 2'-O-methyladenosine-3'-phosphate
  modified_base 8: mod_base = OTHER; note = 2'-O-methyluridine-3'-phosphate
  modified_base 9: mod_base = OTHER; note = 2'-O-methylcytidine-3'-phosphate
  modified_base 10: mod_base = OTHER; note = 2'-O-methyluridine-3'-phosphate
  modified_base 11: mod_base = OTHER; note = 2'-O-methyluridine-3'-phosphate
  modified_base 12: mod_base = OTHER; note = 2'-O-methylcytidine-3'-phosphate
  modified_base 13: mod_base = OTHER; note = 2'-O-methylcytidine-3'-phosphate
  modified_base 14: mod_base = OTHER; note = 2'-deoxy-2'-fluorouridine-3'-phosphate
  modified_base 15: mod_base = OTHER; note = 2'-O-methyluridine-3'-phosphate
  modified_base 16: mod_base = OTHER; note = 2'-deoxy-2'-fluorouridine-3'-phosphate
  modified_base 17: mod_base = OTHER; note = 2'-O-methyladenosine-3'-phosphate
  modified_base 18: mod_base = OTHER; note = 2'-O-methyluridine-3'-phosphate
  modified_base 19: mod_base = OTHER; note = 2'-O-methyluridine-3'-phosphate
  modified_base 20: mod_base = OTHER; note = 2'-O-methyluridine-3'-phosphate
  modified_base 21: mod_base = OTHER; note = 2'-O-methyladenosine-3'-phosphorothioate
  modified_base 22: mod_base = OTHER; note = 2'-O-methyladenosine-3'-phosphorothioate
  modified_base 23: mod_base = OTHER; note = 2'-O-methyladenosine
tgacacatcttcctttatttaaa

SEQ ID NO: 13388 - RNA, 23 nt, synthetic construct
  source 1..23: mol_type = other RNA
gagccaaccgcgcacttcaaaag

SEQ ID NO: 13389 - RNA, 23 nt, synthetic construct
  source 1..23: mol_type = other RNA
agccaaccgcgcacttcaaaagg

SEQ ID NO: 13390 - RNA, 23 nt, synthetic construct
  source 1..23: mol_type = other RNA
gccaaccgcgcacttcaaaaggg

SEQ ID NO: 13391 - RNA, 23 nt, synthetic construct
  source 1..23: mol_type = other RNA
ccaaccgcgcacttcaaaagggt

SEQ ID NO: 13392 - RNA, 23 nt, synthetic construct
  source 1..23: mol_type = other RNA
caaccgcgcacttcaaaagggtg

SEQ ID NO: 13393 - RNA, 23 nt, synthetic construct
  source 1..23: mol_type = other RNA
aaccgcgcacttcaaaagggtgt

SEQ ID NO: 13394 - RNA, 23 nt, synthetic construct
  source 1..23: mol_type = other RNA
accgcgcacttcaaaagggtgtc

SEQ ID NO: 13395 - RNA, 23 nt, synthetic construct
  source 1..23: mol_type = other RNA
ccgcgcacttcaaaagggtgtcg

SEQ ID NO: 13396 - RNA, 23 nt, synthetic construct
  source 1..23: mol_type = other RNA
cgcgcacttcaaaagggtgtcgg

SEQ ID NO: 13397 - RNA, 23 nt, synthetic construct
  source 1..23: mol_type = other RNA
gcgcacttcaaaagggtgtcggt

SEQ ID NO: 13398 - RNA, 23 nt, synthetic construct
  source 1..23: mol_type = other RNA
cgcacttcaaaagggtgtcggtg

SEQ ID NO: 13399 - RNA, 23 nt, synthetic construct
  source 1..23: mol_type = other RNA
gccaggactgaagtgtgtatgtc

SEQ ID NO: 13400 - RNA, 23 nt, synthetic construct
  source 1..23: mol_type = other RNA
tatgtcttttgtgtgattcttca

SEQ ID NO: 13401 - RNA, 23 nt, synthetic construct
  source 1..23: mol_type = other RNA
ttttgtgtgattcttcaaacttc

SEQ ID NO: 13402 - RNA, 23 nt, synthetic construct
  source 1..23: mol_type = other RNA
ctcgccaggactgaagtgtgtat

SEQ ID NO: 13403 - RNA, 23 nt, synthetic construct
  source 1..23: mol_type = other RNA
tcgccaggactgaagtgtgtatg

SEQ ID NO: 13404 - RNA, 23 nt, synthetic construct
  source 1..23: mol_type = other RNA
cgccaggactgaagtgtgtatgt

SEQ ID NO: 13405 - RNA, 23 nt, synthetic construct
  source 1..23: mol_type = other RNA
ccaggactgaagtgtgtatgtct

SEQ ID NO: 13406 - RNA, 23 nt, synthetic construct
  source 1..23: mol_type = other RNA
caggactgaagtgtgtatgtctt

SEQ ID NO: 13407 - RNA, 23 nt, synthetic construct
  source 1..23: mol_type = other RNA
aggactgaagtgtgtatgtcttt

SEQ ID NO: 13408 - RNA, 23 nt, synthetic construct
  source 1..23: mol_type = other RNA
ggactgaagtgtgtatgtctttt

SEQ ID NO: 13409 - RNA, 23 nt, synthetic construct
  source 1..23: mol_type = other RNA
gactgaagtgtgtatgtcttttg

SEQ ID NO: 13410 - RNA, 23 nt, synthetic construct
  source 1..23: mol_type = other RNA
actgaagtgtgtatgtcttttgt

SEQ ID NO: 13411 - RNA, 23 nt, synthetic construct
  source 1..23: mol_type = other RNA
ctgaagtgtgtatgtcttttgtg

SEQ ID NO: 13412 - RNA, 23 nt, synthetic construct
  source 1..23: mol_type = other RNA
tgaagtgtgtatgtcttttgtgt

SEQ ID NO: 13413 - RNA, 23 nt, synthetic construct
  source 1..23: mol_type = other RNA
gaagtgtgtatgtcttttgtgtg

SEQ ID NO: 13414 - RNA, 23 nt, synthetic construct
  source 1..23: mol_type = other RNA
aagtgtgtatgtcttttgtgtga

SEQ ID NO: 13415 - RNA, 23 nt, synthetic construct
  source 1..23: mol_type = other RNA
agtgtgtatgtcttttgtgtgat

SEQ ID NO: 13416 - RNA, 23 nt, synthetic construct
  source 1..23: mol_type = other RNA
gtgtgtatgtcttttgtgtgatt

SEQ ID NO: 13417 - RNA, 23 nt, synthetic construct
  source 1..23: mol_type = other RNA
tgtgtatgtcttttgtgtgattc

SEQ ID NO: 13418 - RNA, 23 nt, synthetic construct
  source 1..23: mol_type = other RNA
gtgtatgtcttttgtgtgattct

SEQ ID NO: 13419 - RNA, 23 nt, synthetic construct
  source 1..23: mol_type = other RNA
tgtatgtcttttgtgtgattctt

SEQ ID NO: 13420 - RNA, 23 nt, synthetic construct
  source 1..23: mol_type = other RNA
gtatgtcttttgtgtgattcttc

SEQ ID NO: 13421 - RNA, 23 nt, synthetic construct
  source 1..23: mol_type = other RNA
atgtcttttgtgtgattcttcaa

SEQ ID NO: 13422 - RNA, 23 nt, synthetic construct
  source 1..23: mol_type = other RNA
tgtcttttgtgtgattcttcaaa

SEQ ID NO: 13423 - RNA, 23 nt, synthetic construct
  source 1..23: mol_type = other RNA
gtcttttgtgtgattcttcaaac

SEQ ID NO: 13424 - RNA, 23 nt, synthetic construct
  source 1..23: mol_type = other RNA
tcttttgtgtgattcttcaaact

SEQ ID NO: 13425 - RNA, 23 nt, synthetic construct
  source 1..23: mol_type = other RNA
cttttgtgtgattcttcaaactt

SEQ ID NO: 13426 - RNA, 23 nt, synthetic construct
  source 1..23: mol_type = other RNA
tgccaaacagaaggagcatgttg

SEQ ID NO: 13427 - RNA, 23 nt, synthetic construct
  source 1..23: mol_type = other RNA
gccaaacagaaggagcatgttgg

SEQ ID NO: 13428 - RNA, 23 nt, synthetic construct
  source 1..23: mol_type = other RNA
tgttgggcatcagtcatgctaac

SEQ ID NO: 13429 - RNA, 23 nt, synthetic construct
  source 1..23: mol_type = other RNA
tgggcatcagtcatgctaaccaa

SEQ ID NO: 13430 - RNA, 23 nt, synthetic construct
  source 1..23: mol_type = other RNA
gcatcagtcatgctaaccaatgg

SEQ ID NO: 13431 - RNA, 23 nt, synthetic construct
  source 1..23: mol_type = other RNA
cagtcatgctaaccaatggaaaa

SEQ ID NO: 13432 - RNA, 23 nt, synthetic construct
  source 1..23: mol_type = other RNA
tcatgctaaccaatggaaaagag

SEQ ID NO: 13433 - RNA, 23 nt, synthetic construct
  source 1..23: mol_type = other RNA
tccagaactgaatgctcaagtct

SEQ ID NO: 13434 - RNA, 23 nt, synthetic construct
  source 1..23: mol_type = other RNA
ggaaaagagcaggtgatcaaatc

SEQ ID NO: 13435 - RNA, 23 nt, synthetic construct
  source 1..23: mol_type = other RNA
gtctcccttccagaactgaatgc

SEQ ID NO: 13436 - RNA, 23 nt, synthetic construct
  source 1..23: mol_type = other RNA
tctcccttccagaactgaatgct

SEQ ID NO: 13437 - RNA, 23 nt, synthetic construct
  source 1..23: mol_type = other RNA
ctcccttccagaactgaatgctc

SEQ ID NO: 13438 - RNA, 23 nt, synthetic construct
  source 1..23: mol_type = other RNA
tcccttccagaactgaatgctca

SEQ ID NO: 13439 - RNA, 23 nt, synthetic construct
  source 1..23: mol_type = other RNA
cccttccagaactgaatgctcaa

SEQ ID NO: 13440 - RNA, 23 nt, synthetic construct
  source 1..23: mol_type = other RNA
ccttccagaactgaatgctcaag

SEQ ID NO: 13441 - RNA, 23 nt, synthetic construct
  source 1..23: mol_type = other RNA
cttccagaactgaatgctcaagt

SEQ ID NO: 13442 - RNA, 23 nt, synthetic construct
  source 1..23: mol_type = other RNA
ttccagaactgaatgctcaagtc

SEQ ID NO: 13443 - RNA, 23 nt, synthetic construct
  source 1..23: mol_type = other RNA
ccagaactgaatgctcaagtctt

SEQ ID NO: 13444 - RNA, 23 nt, synthetic construct
  source 1..23: mol_type = other RNA
cagaactgaatgctcaagtcttc

SEQ ID NO: 13445 - RNA, 23 nt, synthetic construct
  source 1..23: mol_type = other RNA
agaactgaatgctcaagtcttct

SEQ ID NO: 13446 - RNA, 23 nt, synthetic construct
  source 1..23: mol_type = other RNA
gaactgaatgctcaagtcttctg

SEQ ID NO: 13447 - RNA, 23 nt, synthetic construct
  source 1..23: mol_type = other RNA
aactgaatgctcaagtcttctgt

SEQ ID NO: 13448 - RNA, 23 nt, synthetic construct
  source 1..23: mol_type = other RNA
actgaatgctcaagtcttctgtc

SEQ ID NO: 13449 - RNA, 23 nt, synthetic construct
  source 1..23: mol_type = other RNA
ctgaatgctcaagtcttctgtca

SEQ ID NO: 13450 - RNA, 23 nt, synthetic construct
  source 1..23: mol_type = other RNA
tgaatgctcaagtcttctgtcat

SEQ ID NO: 13451 - RNA, 23 nt, synthetic construct
  source 1..23: mol_type = other RNA
gaatgctcaagtcttctgtcata

SEQ ID NO: 13452 - RNA, 23 nt, synthetic construct
  source 1..23: mol_type = other RNA
aatgctcaagtcttctgtcatag

SEQ ID NO: 13453 - RNA, 23 nt, synthetic construct
  source 1..23: mol_type = other RNA
atgctcaagtcttctgtcatagt

SEQ ID NO: 13454 - RNA, 23 nt, synthetic construct
  source 1..23: mol_type = other RNA
tgctcaagtcttctgtcatagtt

SEQ ID NO: 13455 - RNA, 23 nt, synthetic construct
  source 1..23: mol_type = other RNA
gctcaagtcttctgtcatagttc

SEQ ID NO: 13456 - RNA, 23 nt, synthetic construct
  source 1..23: mol_type = other RNA
agtcttctgtcatagttccaaca

SEQ ID NO: 13457 - RNA, 23 nt, synthetic construct
  source 1..23: mol_type = other RNA
ctcaagtcttctgtcatagttcc

SEQ ID NO: 13458 - RNA, 23 nt, synthetic construct
  source 1..23: mol_type = other RNA
tcaagtcttctgtcatagttcca

SEQ ID NO: 13459 - RNA, 23 nt, synthetic construct
  source 1..23: mol_type = other RNA
caagtcttctgtcatagttccaa

SEQ ID NO: 13460 - RNA, 23 nt, synthetic construct
  source 1..23: mol_type = other RNA
aagtcttctgtcatagttccaac

SEQ ID NO: 13461 - RNA, 23 nt, synthetic construct
  source 1..23: mol_type = other RNA
gtcttctgtcatagttccaacaa

SEQ ID NO: 13462 - RNA, 23 nt, synthetic construct
  source 1..23: mol_type = other RNA
tcttctgtcatagttccaacaat

SEQ ID NO: 13463 - RNA, 23 nt, synthetic construct
  source 1..23: mol_type = other RNA
cttctgtcatagttccaacaatg

SEQ ID NO: 13464 - RNA, 23 nt, synthetic construct
  source 1..23: mol_type = other RNA
ttctgtcatagttccaacaatgt

SEQ ID NO: 13465 - RNA, 23 nt, synthetic construct
  source 1..23: mol_type = other RNA
tctgtcatagttccaacaatgtt

SEQ ID NO: 13466 - RNA, 23 nt, synthetic construct
  source 1..23: mol_type = other RNA
ctgtcatagttccaacaatgtta

SEQ ID NO: 13467 - RNA, 23 nt, synthetic construct
  source 1..23: mol_type = other RNA
tgtcatagttccaacaatgttac

SEQ ID NO: 13468 - RNA, 23 nt, synthetic construct
  source 1..23: mol_type = other RNA
gtcatagttccaacaatgttacc

SEQ ID NO: 13469 - RNA, 23 nt, synthetic construct
  source 1..23: mol_type = other RNA
tcatagttccaacaatgttacca

SEQ ID NO: 13470 - RNA, 23 nt, synthetic construct
  source 1..23: mol_type = other RNA
catagttccaacaatgttaccaa

SEQ ID NO: 13471 - RNA, 23 nt, synthetic construct
  source 1..23: mol_type = other RNA
atagttccaacaatgttaccaaa

SEQ ID NO: 13472 - RNA, 23 nt, synthetic construct
  source 1..23: mol_type = other RNA
tagttccaacaatgttaccaaaa

SEQ ID NO: 13473 - RNA, 23 nt, synthetic construct
  source 1..23: mol_type = other RNA
agttccaacaatgttaccaaaac

SEQ ID NO: 13474 - RNA, 23 nt, synthetic construct
  source 1..23: mol_type = other RNA
gttccaacaatgttaccaaaacc

SEQ ID NO: 13475 - RNA, 23 nt, synthetic construct
  source 1..23: mol_type = other RNA
ttccaacaatgttaccaaaaccg

SEQ ID NO: 13476 - RNA, 23 nt, synthetic construct
  source 1..23: mol_type = other RNA
tccaacaatgttaccaaaaccga

SEQ ID NO: 13477 - RNA, 23 nt, synthetic construct
  source 1..23: mol_type = other RNA
ccaacaatgttaccaaaaccgaa

SEQ ID NO: 13478 - RNA, 23 nt, synthetic construct
  source 1..23: mol_type = other RNA
caacaatgttaccaaaaccgaat

SEQ ID NO: 13479 - RNA, 23 nt, synthetic construct
  source 1..23: mol_type = other RNA
aacaatgttaccaaaaccgaatg

SEQ ID NO: 13480 - RNA, 23 nt, synthetic construct
  source 1..23: mol_type = other RNA
acaatgttaccaaaaccgaatgc

SEQ ID NO: 13481 - RNA, 23 nt, synthetic construct
  source 1..23: mol_type = other RNA
caatgttaccaaaaccgaatgct

SEQ ID NO: 13482 - RNA, 23 nt, synthetic construct
  source 1..23: mol_type = other RNA
aatgttaccaaaaccgaatgctg

SEQ ID NO: 13483 - RNA, 23 nt, synthetic construct
  source 1..23: mol_type = other RNA
atgttaccaaaaccgaatgctgc

SEQ ID NO: 13484 - RNA, 23 nt, synthetic construct
  source 1..23: mol_type = other RNA
tgttaccaaaaccgaatgctgct

SEQ ID NO: 13485 - RNA, 23 nt, synthetic construct
  source 1..23: mol_type = other RNA
gttaccaaaaccgaatgctgctt

SEQ ID NO: 13486 - RNA, 23 nt, synthetic construct
  source 1..23: mol_type = other RNA
ttaccaaaaccgaatgctgcttc

SEQ ID NO: 13487 - RNA, 23 nt, synthetic construct
  source 1..23: mol_type = other RNA
taccaaaaccgaatgctgcttca

SEQ ID NO: 13488 - RNA, 23 nt, synthetic construct
  source 1..23: mol_type = other RNA
accaaaaccgaatgctgcttcac

SEQ ID NO: 13489 - RNA, 23 nt, synthetic construct
  source 1..23: mol_type = other RNA
ccaaaaccgaatgctgcttcaca

SEQ ID NO: 13490 - RNA, 23 nt, synthetic construct
  source 1..23: mol_type = other RNA
caaaaccgaatgctgcttcacag

SEQ ID NO: 13491 - RNA, 23 nt, synthetic construct
  source 1..23: mol_type = other RNA
aaaaccgaatgctgcttcacaga

SEQ ID NO: 13492 - RNA, 23 nt, synthetic construct
  source 1..23: mol_type = other RNA
aaaccgaatgctgcttcacagat

SEQ ID NO: 13493 - RNA, 23 nt, synthetic construct
  source 1..23: mol_type = other RNA
accgaatgctgcttcacagattt

SEQ ID NO: 13494 - RNA, 23 nt, synthetic construct
  source 1..23: mol_type = other RNA
gaatgctgcttcacagatttttg

SEQ ID NO: 13495 - RNA, 23 nt, synthetic construct
  source 1..23: mol_type = other RNA
aatgctgcttcacagatttttgc

SEQ ID NO: 13496 - RNA, 23 nt, synthetic construct
  source 1..23: mol_type = other RNA
atgctgcttcacagatttttgca

SEQ ID NO: 13497 - RNA, 23 nt, synthetic construct
  source 1..23: mol_type = other RNA
tgctgcttcacagatttttgcaa

SEQ ID NO: 13498 - RNA, 23 nt, synthetic construct
  source 1..23: mol_type = other RNA
gctgcttcacagatttttgcaac

SEQ ID NO: 13499 - RNA, 23 nt, synthetic construct
  source 1..23: mol_type = other RNA
ctgcttcacagatttttgcaaca

SEQ ID NO: 13500 - RNA, 23 nt, synthetic construct
  source 1..23: mol_type = other RNA
tgcttcacagatttttgcaacaa

SEQ ID NO: 13501 - RNA, 23 nt, synthetic construct
  source 1..23: mol_type = other RNA
gcttcacagatttttgcaacaac

SEQ ID NO: 13502 - RNA, 23 nt, synthetic construct
  source 1..23: mol_type = other RNA
cttcacagatttttgcaacaaca

SEQ ID NO: 13503 - RNA, 23 nt, synthetic construct
  source 1..23: mol_type = other RNA
ttcacagatttttgcaacaacat

SEQ ID NO: 13504 - RNA, 23 nt, synthetic construct
  source 1..23: mol_type = other RNA
tcacagatttttgcaacaacata

SEQ ID NO: 13505 - RNA, 23 nt, synthetic construct
  source 1..23: mol_type = other RNA
tttttgcaacaacataacactgc

SEQ ID NO: 13506 - RNA, 23 nt, synthetic construct
  source 1..23: mol_type = other RNA
ccttccaacagcatcaccaaatg

SEQ ID NO: 13507 - RNA, 23 nt, synthetic construct
  source 1..23: mol_type = other RNA
cacagatttttgcaacaacataa

SEQ ID NO: 13508 - RNA, 23 nt, synthetic construct
  source 1..23: mol_type = other RNA
acagatttttgcaacaacataac

SEQ ID NO: 13509 - RNA, 23 nt, synthetic construct
  source 1..23: mol_type = other RNA
cagatttttgcaacaacataaca

SEQ ID NO: 13510 - RNA, 23 nt, synthetic construct
  source 1..23: mol_type = other RNA
agatttttgcaacaacataacac

SEQ ID NO: 13511 - RNA, 23 nt, synthetic construct
  source 1..23: mol_type = other RNA
gatttttgcaacaacataacact

SEQ ID NO: 13512 - RNA, 23 nt, synthetic construct
  source 1..23: mol_type = other RNA
atttttgcaacaacataacactg

SEQ ID NO: 13513 - RNA, 23 nt, synthetic construct
  source 1..23: mol_type = other RNA
ttttgcaacaacataacactgca

SEQ ID NO: 13514 - RNA, 23 nt, synthetic construct
  source 1..23: mol_type = other RNA
tttgcaacaacataacactgcac

SEQ ID NO: 13515 - RNA, 23 nt, synthetic construct
  source 1..23: mol_type = other RNA
ttgcaacaacataacactgcacc

SEQ ID NO: 13516 - RNA, 23 nt, synthetic construct
  source 1..23: mol_type = other RNA
tgcaacaacataacactgcacct

SEQ ID NO: 13517 - RNA, 23 nt, synthetic construct
  source 1..23: mol_type = other RNA
gcaacaacataacactgcacctt

SEQ ID NO: 13518 - RNA, 23 nt, synthetic construct
  source 1..23: mol_type = other RNA
caacaacataacactgcaccttc

SEQ ID NO: 13519 - RNA, 23 nt, synthetic construct
  source 1..23: mol_type = other RNA
aacaacataacactgcaccttcc

SEQ ID NO: 13520 - RNA, 23 nt, synthetic construct
  source 1..23: mol_type = other RNA
acaacataacactgcaccttcca

SEQ ID NO: 13521 - RNA, 23 nt, synthetic construct
  source 1..23: mol_type = other RNA
caacataacactgcaccttccaa

SEQ ID NO: 13522 - RNA, 23 nt, synthetic construct
  source 1..23: mol_type = other RNA
aacataacactgcaccttccaac

SEQ ID NO: 13523 - RNA, 23 nt, synthetic construct
  source 1..23: mol_type = other RNA
acataacactgcaccttccaaca

SEQ ID NO: 13524 - RNA, 23 nt, synthetic construct
  source 1..23: mol_type = other RNA
cataacactgcaccttccaacag

SEQ ID NO: 13525 - RNA, 23 nt, synthetic construct
  source 1..23: mol_type = other RNA
ataacactgcaccttccaacagc

SEQ ID NO: 13526 - RNA, 23 nt, synthetic construct
  source 1..23: mol_type = other RNA
taacactgcaccttccaacagca

SEQ ID NO: 13527 - RNA, 23 nt, synthetic construct
  source 1..23: mol_type = other RNA
aacactgcaccttccaacagcat

SEQ ID NO: 13528 - RNA, 23 nt, synthetic construct
  source 1..23: mol_type = other RNA
acactgcaccttccaacagcatc

SEQ ID NO: 13529 - RNA, 23 nt, synthetic construct
  source 1..23: mol_type = other RNA
cactgcaccttccaacagcatca

SEQ ID NO: 13530 - RNA, 23 nt, synthetic construct
  source 1..23: mol_type = other RNA
actgcaccttccaacagcatcac

SEQ ID NO: 13531 - RNA, 23 nt, synthetic construct
  source 1..23: mol_type = other RNA
ctgcaccttccaacagcatcacc

SEQ ID NO: 13532 - RNA, 23 nt, synthetic construct
  source 1..23: mol_type = other RNA
tgcaccttccaacagcatcacca

SEQ ID NO: 13533 - RNA, 23 nt, synthetic construct
  source 1..23: mol_type = other RNA
gcaccttccaacagcatcaccaa

SEQ ID NO: 13534 - RNA, 23 nt, synthetic construct
  source 1..23: mol_type = other RNA
caccttccaacagcatcaccaaa

SEQ ID NO: 13535 - RNA, 23 nt, synthetic construct
  source 1..23: mol_type = other RNA
accttccaacagcatcaccaaat

SEQ ID NO: 13536 - RNA, 23 nt, synthetic construct
  source 1..23: mol_type = other RNA
cttccaacagcatcaccaaatgc

SEQ ID NO: 13537 - RNA, 23 nt, synthetic construct
  source 1..23: mol_type = other RNA
ttccaacagcatcaccaaatgcc

SEQ ID NO: 13538 - RNA, 23 nt, synthetic construct
  source 1..23: mol_type = other RNA
tccaacagcatcaccaaatgccc

SEQ ID NO: 13539 - RNA, 23 nt, synthetic construct
  source 1..23: mol_type = other RNA
atggagctggccatcattattac

SEQ ID NO: 13540 - RNA, 23 nt, synthetic construct
  source 1..23: mol_type = other RNA
agctggccatcattattactgtg

SEQ ID NO: 13541 - RNA, 23 nt, synthetic construct
  source 1..23: mol_type = other RNA
gagctggccatcattattactgt

SEQ ID NO: 13542 - RNA, 23 nt, synthetic construct
  source 1..23: mol_type = other RNA
ctggccatcattattactgtgcc

SEQ ID NO: 13543 - RNA, 23 nt, synthetic construct
  source 1..23: mol_type = other RNA
atcattattactgtgcctgtttg

SEQ ID NO: 13544 - RNA, 23 nt, synthetic construct
  source 1..23: mol_type = other RNA
ttattactgtgcctgtttgcctc

SEQ ID NO: 13545 - RNA, 23 nt, synthetic construct
  source 1..23: mol_type = other RNA
gtgcctgtttgcctcctgtccat

SEQ ID NO: 13546 - RNA, 23 nt, synthetic construct
  source 1..23: mol_type = other RNA
atagctgcgatgctgacagtatg

SEQ ID NO: 13547 - RNA, 23 nt, synthetic construct
  source 1..23: mol_type = other RNA
cagtgctcctacaggaagaaaaa

SEQ ID NO: 13548 - RNA, 23 nt, synthetic construct
  source 1..23: mol_type = other RNA
agtgctcctacaggaagaaaaag

SEQ ID NO: 13549 - RNA, 23 nt, synthetic construct
  source 1..23: mol_type = other RNA
tgctcctacaggaagaaaaagag

SEQ ID NO: 13550 - RNA, 23 nt, synthetic construct
  source 1..23: mol_type = other RNA
tcctacaggaagaaaaagagacc

SEQ ID NO: 13551 - RNA, 23 nt, synthetic construct
  source 1..23: mol_type = other RNA
gcaatctggtaaatgctggaaaa

SEQ ID NO: 13552 - RNA, 23 nt, synthetic construct
  source 1..23: mol_type = other RNA
accactctctgagtgcaatctgg

SEQ ID NO: 13553 - RNA, 23 nt, synthetic construct
  source 1..23: mol_type = other RNA
ctctctgagtgcaatctggtaaa

SEQ ID NO: 13554 - RNA, 23 nt, synthetic construct
  source 1..23: mol_type = other RNA
tctgagtgcaatctggtaaatgc

SEQ ID NO: 13555 - RNA, 23 nt, synthetic construct
  source 1..23: mol_type = other RNA
atctggtaaatgctggaaaaact

SEQ ID NO: 13556 - RNA, 23 nt, synthetic construct
  source 1..23: mol_type = other RNA
atgctggaaaaactctgaaagat

SEQ ID NO: 13557 - RNA, 23 nt, synthetic construct
  source 1..23: mol_type = other RNA
gctggaaaaactctgaaagatct

SEQ ID NO: 13558 - RNA, 23 nt, synthetic construct
  source 1..23: mol_type = other RNA
ctggaaaaactctgaaagatctg

SEQ ID NO: 13559 - RNA, 23 nt, synthetic construct
  source 1..23: mol_type = other RNA
tggaaaaactctgaaagatctga

SEQ ID NO: 13560 - RNA, 23 nt, synthetic construct
  source 1..23: mol_type = other RNA
aaactctgaaagatctgatttat

SEQ ID NO: 13561 - RNA, 23 nt, synthetic construct
  source 1..23: mol_type = other RNA
ggaaaaactctgaaagatctgat

SEQ ID NO: 13562 - RNA, 23 nt, synthetic construct
  source 1..23: mol_type = other RNA
gaaaaactctgaaagatctgatt

SEQ ID NO: 13563 - RNA, 23 nt, synthetic construct
  source 1..23: mol_type = other RNA
aaaaactctgaaagatctgattt

SEQ ID NO: 13564 - RNA, 23 nt, synthetic construct
  source 1..23: mol_type = other RNA
aaaactctgaaagatctgattta

SEQ ID NO: 13565 - RNA, 23 nt, synthetic construct
  source 1..23: mol_type = other RNA
aactctgaaagatctgatttatg

SEQ ID NO: 13566 - RNA, 23 nt, synthetic construct
  source 1..23: mol_type = other RNA
actctgaaagatctgatttatga

SEQ ID NO: 13567 - RNA, 23 nt, synthetic construct
  source 1..23: mol_type = other RNA
ctctgaaagatctgatttatgat

SEQ ID NO: 13568 - RNA, 23 nt, synthetic construct
  source 1..23: mol_type = other RNA
tctgaaagatctgatttatgatg

SEQ ID NO: 13569 - RNA, 23 nt, synthetic construct
  source 1..23: mol_type = other RNA
ctgaaagatctgatttatgatgt

SEQ ID NO: 13570 - RNA, 23 nt, synthetic construct
  source 1..23: mol_type = other RNA
tgaaagatctgatttatgatgtg

SEQ ID NO: 13571 - RNA, 23 nt, synthetic construct
  source 1..23: mol_type = other RNA
gaaagatctgatttatgatgtga

SEQ ID NO: 13572 - RNA, 23 nt, synthetic construct
  source 1..23: mol_type = other RNA
aaagatctgatttatgatgtgac

SEQ ID NO: 13573 - RNA, 23 nt, synthetic construct
  source 1..23: mol_type = other RNA
aagatctgatttatgatgtgacc

SEQ ID NO: 13574 - RNA, 23 nt, synthetic construct
  source 1..23: mol_type = other RNA
tctgttggttcaaaggacaattg

SEQ ID NO: 13575 - RNA, 23 nt, synthetic construct
  source 1..23: mol_type = other RNA
tggtctacctctgttggttcaaa

SEQ ID NO: 13576 - RNA, 23 nt, synthetic construct
  source 1..23: mol_type = other RNA
ggtctacctctgttggttcaaag

SEQ ID NO: 13577 - RNA, 23 nt, synthetic construct
  source 1..23: mol_type = other RNA
ctacctctgttggttcaaaggac

SEQ ID NO: 13578 - RNA, 23 nt, synthetic construct
  source 1..23: mol_type = other RNA
tacctctgttggttcaaaggaca

SEQ ID NO: 13579 - RNA, 23 nt, synthetic construct
  source 1..23: mol_type = other RNA
ctctgttggttcaaaggacaatt

SEQ ID NO: 13580 - RNA, 23 nt, synthetic construct
  source 1..23: mol_type = other RNA
ttggttcaaaggacaattgcaag

SEQ ID NO: 13581 - RNA, 23 nt, synthetic construct
  source 1..23: mol_type = other RNA
gttcaaaggacaattgcaaggac

SEQ ID NO: 13582 - RNA, 23 nt, synthetic construct
  source 1..23: mol_type = other RNA
aatagtaggaaaaggtagatttg

SEQ ID NO: 13583 - RNA, 23 nt, synthetic construct
  source 1..23: mol_type = other RNA
agtaggaaaaggtagatttggtg

SEQ ID NO: 13584 - RNA, 23 nt, synthetic construct
  source 1..23: mol_type = other RNA
gggaagatgtggctgtgaaaata

SEQ ID NO: 13585 - RNA, 23 nt, synthetic construct
  source 1..23: mol_type = other RNA
ggaagatgtggctgtgaaaatat

SEQ ID NO: 13586 - RNA, 23 nt, synthetic construct
  source 1..23: mol_type = other RNA
gaagatgtggctgtgaaaatatt

SEQ ID NO: 13587 - RNA, 23 nt, synthetic construct
  source 1..23: mol_type = other RNA
ctcctccagagatgaaagatctt

SEQ ID NO: 13588 - RNA, 23 nt, synthetic construct
  source 1..23: mol_type = other RNA
ttctcctccagagatgaaagatc

SEQ ID NO: 13589 - RNA, 23 nt, synthetic construct
  source 1..23: mol_type = other RNA
tctcctccagagatgaaagatct

SEQ ID NO: 13590 - RNA, 23 nt, synthetic construct
  source 1..23: mol_type = other RNA
tcctccagagatgaaagatcttg

SEQ ID NO: 13591 - RNA, 23 nt, synthetic construct
  source 1..23: mol_type = other RNA
cctccagagatgaaagatcttgg

SEQ ID NO: 13592 - RNA, 23 nt, synthetic construct
  source 1..23: mol_type = other RNA
ctccagagatgaaagatcttggt

SEQ ID NO: 13593 - RNA, 23 nt, synthetic construct
  source 1..23: mol_type = other RNA
ccagagatgaaagatcttggttt

SEQ ID NO: 13594 - RNA, 23 nt, synthetic construct
  source 1..23: mol_type = other RNA
cagagatgaaagatcttggtttc

SEQ ID NO: 13595 - RNA, 23 nt, synthetic construct
  source 1..23: mol_type = other RNA
agatgaaagatcttggtttcgtg

SEQ ID NO: 13596 - RNA, 23 nt, synthetic construct
  source 1..23: mol_type = other RNA
ggtttcgtgaggcagaaatttac

SEQ ID NO: 13597 - RNA, 23 nt, synthetic construct
  source 1..23: mol_type = other RNA
gctgcgacatgaaaacatccttg

SEQ ID NO: 13598 - RNA, 23 nt, synthetic construct
  source 1..23: mol_type = other RNA
cattgctgctgacaacaaagata

SEQ ID NO: 13599 - RNA, 23 nt, synthetic construct
  source 1..23: mol_type = other RNA
tcatgctgcgacatgaaaacatc

SEQ ID NO: 13600 - RNA, 23 nt, synthetic construct
  source 1..23: mol_type = other RNA
tgctgcgacatgaaaacatcctt

SEQ ID NO: 13601 - RNA, 23 nt, synthetic construct
  source 1..23: mol_type = other RNA
ctgcgacatgaaaacatccttgg

SEQ ID NO: 13602 - RNA, 23 nt, synthetic construct
  source 1..23: mol_type = other RNA
gcgacatgaaaacatccttggtt

SEQ ID NO: 13603 - RNA, 23 nt, synthetic construct
  source 1..23: mol_type = other RNA
cgacatgaaaacatccttggttt

SEQ ID NO: 13604 - RNA, 23 nt, synthetic construct
  source 1..23: mol_type = other RNA
gacatgaaaacatccttggtttc

SEQ ID NO: 13605 - RNA, 23 nt, synthetic construct
  source 1..23: mol_type = other RNA
atgaaaacatccttggtttcatt

SEQ ID NO: 13606 - RNA, 23 nt, synthetic construct
  source 1..23: mol_type = other RNA
aacatccttggtttcattgctgc

SEQ ID NO: 13607 - RNA, 23 nt, synthetic construct
  source 1..23: mol_type = other RNA
tccttggtttcattgctgctgac

SEQ ID NO: 13608 - RNA, 23 nt, synthetic construct
  source 1..23: mol_type = other RNA
ttggtttcattgctgctgacaac

SEQ ID NO: 13609 - RNA, 23 nt, synthetic construct
  source 1..23: mol_type = other RNA
gtttcattgctgctgacaacaaa

SEQ ID NO: 13610 - RNA, 23 nt, synthetic construct
  source 1..23: mol_type = other RNA
tttcattgctgctgacaacaaag

SEQ ID NO: 13611 - RNA, 23 nt, synthetic construct
  source 1..23: mol_type = other RNA
gctgctgacaacaaagataatgg

SEQ ID NO: 13612 - RNA, 23 nt, synthetic construct
  source 1..23: mol_type = other RNA
ctgctgacaacaaagataatgga

SEQ ID NO: 13613 - RNA, 23 nt, synthetic construct
  source 1..23: mol_type = other RNA
gctgacaacaaagataatggaac

SEQ ID NO: 13614 - RNA, 23 nt, synthetic construct
  source 1..23: mol_type = other RNA
ctgacaacaaagataatggaact

SEQ ID NO: 13615 - RNA, 23 nt, synthetic construct
  source 1..23: mol_type = other RNA
gctggtatctgaatatcatgaac

SEQ ID NO: 13616 - RNA, 23 nt, synthetic construct
  source 1..23: mol_type = other RNA
acaacaaagataatggaacttgg

SEQ ID NO: 13617 - RNA, 23 nt, synthetic construct
  source 1..23: mol_type = other RNA
caactttggctggtatctgaata

SEQ ID NO: 13618 - RNA, 23 nt, synthetic construct
  source 1..23: mol_type = other RNA
actttggctggtatctgaatatc

SEQ ID NO: 13619 - RNA, 23 nt, synthetic construct
  source 1..23: mol_type = other RNA
ctttggctggtatctgaatatca

SEQ ID NO: 13620 - RNA, 23 nt, synthetic construct
  source 1..23: mol_type = other RNA
tttggctggtatctgaatatcat

SEQ ID NO: 13621 - RNA, 23 nt, synthetic construct
  source 1..23: mol_type = other RNA
tggtatctgaatatcatgaacag

SEQ ID NO: 13622 - RNA, 23 nt, synthetic construct
  source 1..23: mol_type = other RNA
atcatgaacagggctccttatat

SEQ ID NO: 13623 - RNA, 23 nt, synthetic construct
  source 1..23: mol_type = other RNA
tcatgaacagggctccttatatg

SEQ ID NO: 13624 - RNA, 23 nt, synthetic construct
  source 1..23: mol_type = other RNA
ggctccttatatgactatttgaa

SEQ ID NO: 13625 - RNA, 23 nt, synthetic construct
  source 1..23: mol_type = other RNA
gaacagggctccttatatgacta

SEQ ID NO: 13626 - RNA, 23 nt, synthetic construct
  source 1..23: mol_type = other RNA
aacagggctccttatatgactat

SEQ ID NO: 13627 - RNA, 23 nt, synthetic construct
  source 1..23: mol_type = other RNA
acagggctccttatatgactatt

SEQ ID NO: 13628 - RNA, 23 nt, synthetic construct
  source 1..23: mol_type = other RNA
cagggctccttatatgactattt

SEQ ID NO: 13629 - RNA, 23 nt, synthetic construct
  source 1..23: mol_type = other RNA
agggctccttatatgactatttg

SEQ ID NO: 13630 - RNA, 23 nt, synthetic construct
  source 1..23: mol_type = other RNA
gggctccttatatgactatttga

SEQ ID NO: 13631 - RNA, 23 nt, synthetic construct
  source 1..23: mol_type = other RNA
gctccttatatgactatttgaat

SEQ ID NO: 13632 - RNA, 23 nt, synthetic construct
  source 1..23: mol_type = other RNA
ctccttatatgactatttgaata

SEQ ID NO: 13633 - RNA, 23 nt, synthetic construct
  source 1..23: mol_type = other RNA
ccttatatgactatttgaataga

SEQ ID NO: 13634 - RNA, 23 nt, synthetic construct
  source 1..23: mol_type = other RNA
tagtgaccgtggctggaatgatc

SEQ ID NO: 13635 - RNA, 23 nt, synthetic construct
  source 1..23: mol_type = other RNA
accgtggctggaatgatcaagct

SEQ ID NO: 13636 - RNA, 23 nt, synthetic construct
  source 1..23: mol_type = other RNA
cgtggctggaatgatcaagctgg

SEQ ID NO: 13637 - RNA, 23 nt, synthetic construct
  source 1..23: mol_type = other RNA
ggcacaccttcatatggagattg

SEQ ID NO: 13638 - RNA, 23 nt, synthetic construct
  source 1..23: mol_type = other RNA
ctggcgctctcaattgctagtgg

SEQ ID NO: 13639 - RNA, 23 nt, synthetic construct
  source 1..23: mol_type = other RNA
cgctctcaattgctagtggtctg

SEQ ID NO: 13640 - RNA, 23 nt, synthetic construct
  source 1..23: mol_type = other RNA
gtctggcacaccttcatatggag

SEQ ID NO: 13641 - RNA, 23 nt, synthetic construct
  source 1..23: mol_type = other RNA
tctggcacaccttcatatggaga

SEQ ID NO: 13642 - RNA, 23 nt, synthetic construct
  source 1..23: mol_type = other RNA
ctggcacaccttcatatggagat

SEQ ID NO: 13643 - RNA, 23 nt, synthetic construct
  source 1..23: mol_type = other RNA
tggcacaccttcatatggagatt

SEQ ID NO: 13644 - RNA, 23 nt, synthetic construct
  source 1..23: mol_type = other RNA
gcacaccttcatatggagattgt

SEQ ID NO: 13645 - RNA, 23 nt, synthetic construct
  source 1..23: mol_type = other RNA
cacaccttcatatggagattgtt

SEQ ID NO: 13646 - RNA, 23 nt, synthetic construct
  source 1..23: mol_type = other RNA
acaccttcatatggagattgttg

SEQ ID NO: 13647 - RNA, 23 nt, synthetic construct
  source 1..23: mol_type = other RNA
caccttcatatggagattgttgg

SEQ ID NO: 13648 - RNA, 23 nt, synthetic construct
  source 1..23: mol_type = other RNA
accttcatatggagattgttggt

SEQ ID NO: 13649 - RNA, 23 nt, synthetic construct
  source 1..23: mol_type = other RNA
ccttcatatggagattgttggta

SEQ ID NO: 13650 - RNA, 23 nt, synthetic construct
  source 1..23: mol_type = other RNA
cttcatatggagattgttggtac

SEQ ID NO: 13651 - RNA, 23 nt, synthetic construct
  source 1..23: mol_type = other RNA
ttcatatggagattgttggtaca

SEQ ID NO: 13652 - RNA, 23 nt, synthetic construct
  source 1..23: mol_type = other RNA
tcatatggagattgttggtacac

SEQ ID NO: 13653 - RNA, 23 nt, synthetic construct
  source 1..23: mol_type = other RNA
catatggagattgttggtacaca

SEQ ID NO: 13654 - RNA, 23 nt, synthetic construct
  source 1..23: mol_type = other RNA
atatggagattgttggtacacaa

SEQ ID NO: 13655 - RNA, 23 nt, synthetic construct
  source 1..23: mol_type = other RNA
tatggagattgttggtacacaag

SEQ ID NO: 13656 - RNA, 23 nt, synthetic construct
  source 1..23: mol_type = other RNA
ctattgctcatcgagacataaaa

SEQ ID NO: 13657 - RNA, 23 nt, synthetic construct
  source 1..23: mol_type = other RNA
atggagattgttggtacacaagg

SEQ ID NO: 13658 - RNA, 23 nt, synthetic construct
  source 1..23: mol_type = other RNA
tggagattgttggtacacaaggt

SEQ ID NO: 13659 - RNA, 23 nt, synthetic construct
  source 1..23: mol_type = other RNA
agattgttggtacacaaggtaaa

SEQ ID NO: 13660 - RNA, 23 nt, synthetic construct
  source 1..23: mol_type = other RNA
tgttggtacacaaggtaaacctg

SEQ ID NO: 13661 - RNA, 23 nt, synthetic construct
  source 1..23: mol_type = other RNA
tggtacacaaggtaaacctgcta

SEQ ID NO: 13662 - RNA, 23 nt, synthetic construct
  source 1..23: mol_type = other RNA
ggtacacaaggtaaacctgctat

SEQ ID NO: 13663 - RNA, 23 nt, synthetic construct
  source 1..23: mol_type = other RNA
gtacacaaggtaaacctgctatt

SEQ ID NO: 13664 - RNA, 23 nt, synthetic construct
  source 1..23: mol_type = other RNA
tacacaaggtaaacctgctattg

SEQ ID NO: 13665 - RNA, 23 nt, synthetic construct
  source 1..23: mol_type = other RNA
acacaaggtaaacctgctattgc

SEQ ID NO: 13666 - RNA, 23 nt, synthetic construct
  source 1..23: mol_type = other RNA
cacaaggtaaacctgctattgct

SEQ ID NO: 13667 - RNA, 23 nt, synthetic construct
  source 1..23: mol_type = other RNA
acaaggtaaacctgctattgctc

SEQ ID NO: 13668 - RNA, 23 nt, synthetic construct
  source 1..23: mol_type = other RNA
caaggtaaacctgctattgctca

SEQ ID NO: 13669 - RNA, 23 nt, synthetic construct
  source 1..23: mol_type = other RNA
aaggtaaacctgctattgctcat

SEQ ID NO: 13670 - RNA, 23 nt, synthetic construct
  source 1..23: mol_type = other RNA
aggtaaacctgctattgctcatc

SEQ ID NO: 13671 - RNA, 23 nt, synthetic construct
  source 1..23: mol_type = other RNA
ggtaaacctgctattgctcatcg

SEQ ID NO: 13672 - RNA, 23 nt, synthetic construct
  source 1..23: mol_type = other RNA
gtaaacctgctattgctcatcga

SEQ ID NO: 13673 - RNA, 23 nt, synthetic construct
  source 1..23: mol_type = other RNA
taaacctgctattgctcatcgag

SEQ ID NO: 13674 - RNA, 23 nt, synthetic construct
  source 1..23: mol_type = other RNA
aaacctgctattgctcatcgaga

SEQ ID NO: 13675 - RNA, 23 nt, synthetic construct
  source 1..23: mol_type = other RNA
aacctgctattgctcatcgagac

SEQ ID NO: 13676 - RNA, 23 nt, synthetic construct
  source 1..23: mol_type = other RNA
acctgctattgctcatcgagaca

SEQ ID NO: 13677 - RNA, 23 nt, synthetic construct
  source 1..23: mol_type = other RNA
cctgctattgctcatcgagacat

SEQ ID NO: 13678 - RNA, 23 nt, synthetic construct
  source 1..23: mol_type = other RNA
ctgctattgctcatcgagacata

SEQ ID NO: 13679 - RNA, 23 nt, synthetic construct
  source 1..23: mol_type = other RNA
tgctattgctcatcgagacataa

SEQ ID NO: 13680 - RNA, 23 nt, synthetic construct
  source 1..23: mol_type = other RNA
gctattgctcatcgagacataaa

SEQ ID NO: 13681 - RNA, 23 nt, synthetic construct
  source 1..23: mol_type = other RNA
tattgctcatcgagacataaaat

SEQ ID NO: 13682 - RNA, 23 nt, synthetic construct
  source 1..23: mol_type = other RNA
attgctcatcgagacataaaatc

SEQ ID NO: 13683 - RNA, 23 nt, synthetic construct
  source 1..23: mol_type = other RNA
ttgctcatcgagacataaaatca

SEQ ID NO: 13684 - RNA, 23 nt, synthetic construct
  source 1..23: mol_type = other RNA
tgctcatcgagacataaaatcaa

SEQ ID NO: 13685 - RNA, 23 nt, synthetic construct
  source 1..23: mol_type = other RNA
gctcatcgagacataaaatcaaa

SEQ ID NO: 13686 - RNA, 23 nt, synthetic construct
  source 1..23: mol_type = other RNA
ctcatcgagacataaaatcaaag

SEQ ID NO: 13687 - RNA, 23 nt, synthetic construct
  source 1..23: mol_type = other RNA
tcatcgagacataaaatcaaaga

SEQ ID NO: 13688 - RNA, 23 nt, synthetic construct
  source 1..23: mol_type = other RNA
catcgagacataaaatcaaagaa

SEQ ID NO: 13689 - RNA, 23 nt, synthetic construct
  source 1..23: mol_type = other RNA
atcgagacataaaatcaaagaat

SEQ ID NO: 13690 - RNA, 23 nt, synthetic construct
  source 1..23: mol_type = other RNA
tcgagacataaaatcaaagaata

SEQ ID NO: 13691 - RNA, 23 nt, synthetic construct
  source 1..23: mol_type = other RNA
cgagacataaaatcaaagaatat

SEQ ID NO: 13692 - RNA, 23 nt, synthetic construct
  source 1..23: mol_type = other RNA
aaagtgtgaaacttgtgccatag

SEQ ID NO: 13693 - RNA, 23 nt, synthetic construct
  source 1..23: mol_type = other RNA
agaatatcttagtgaaaaagtgt

SEQ ID NO: 13694 - RNA, 23 nt, synthetic construct
  source 1..23: mol_type = other RNA
gaatatcttagtgaaaaagtgtg

SEQ ID NO: 13695 - RNA, 23 nt, synthetic construct
  source 1..23: mol_type = other RNA
aatatcttagtgaaaaagtgtga

SEQ ID NO: 13696 - RNA, 23 nt, synthetic construct
  source 1..23: mol_type = other RNA
atatcttagtgaaaaagtgtgaa

SEQ ID NO: 13697 - RNA, 23 nt, synthetic construct
  source 1..23: mol_type = other RNA
tatcttagtgaaaaagtgtgaaa

SEQ ID NO: 13698 - RNA, 23 nt, synthetic construct
  source 1..23: mol_type = other RNA
atcttagtgaaaaagtgtgaaac

SEQ ID NO: 13699 - RNA, 23 nt, synthetic construct
  source 1..23: mol_type = other RNA
tcttagtgaaaaagtgtgaaact

SEQ ID NO: 13700 - RNA, 23 nt, synthetic construct
  source 1..23: mol_type = other RNA
cttagtgaaaaagtgtgaaactt

SEQ ID NO: 13701 - RNA, 23 nt, synthetic construct
  source 1..23: mol_type = other RNA
ttagtgaaaaagtgtgaaacttg

SEQ ID NO: 13702 - RNA, 23 nt, synthetic construct
  source 1..23: mol_type = other RNA
tagtgaaaaagtgtgaaacttgt

SEQ ID NO: 13703 - RNA, 23 nt, synthetic construct
  source 1..23: mol_type = other RNA
agtgaaaaagtgtgaaacttgtg

SEQ ID NO: 13704 - RNA, 23 nt, synthetic construct
  source 1..23: mol_type = other RNA
gtgaaaaagtgtgaaacttgtgc

SEQ ID NO: 13705 - RNA, 23 nt, synthetic construct
  source 1..23: mol_type = other RNA
tgaaaaagtgtgaaacttgtgcc

SEQ ID NO: 13706 - RNA, 23 nt, synthetic construct
  source 1..23: mol_type = other RNA
gaaaaagtgtgaaacttgtgcca

SEQ ID NO: 13707 - RNA, 23 nt, synthetic construct
  source 1..23: mol_type = other RNA
aaaagtgtgaaacttgtgccata

SEQ ID NO: 13708 - RNA, 23 nt, synthetic construct
  source 1..23: mol_type = other RNA
ctgtgaagcatgattcaatactg

SEQ ID NO: 13709 - RNA, 23 nt, synthetic construct
  source 1..23: mol_type = other RNA
tggctgtgaagcatgattcaata

SEQ ID NO: 13710 - RNA, 23 nt, synthetic construct
  source 1..23: mol_type = other RNA
ggctgtgaagcatgattcaatac

SEQ ID NO: 13711 - RNA, 23 nt, synthetic construct
  source 1..23: mol_type = other RNA
tgtgaagcatgattcaatactga

SEQ ID NO: 13712 - RNA, 23 nt, synthetic construct
  source 1..23: mol_type = other RNA
aagcatgattcaatactgaacac

SEQ ID NO: 13713 - RNA, 23 nt, synthetic construct
  source 1..23: mol_type = other RNA
gcatgattcaatactgaacacta

SEQ ID NO: 13714 - RNA, 23 nt, synthetic construct
  source 1..23: mol_type = other RNA
catgattcaatactgaacactat

SEQ ID NO: 13715 - RNA, 23 nt, synthetic construct
  source 1..23: mol_type = other RNA
caatactgaacactatcgacata

SEQ ID NO: 13716 - RNA, 23 nt, synthetic construct
  source 1..23: mol_type = other RNA
atactgaacactatcgacatacc

SEQ ID NO: 13717 - RNA, 23 nt, synthetic construct
  source 1..23: mol_type = other RNA
acatacctcagaatcctaaagtg

SEQ ID NO: 13718 - RNA, 23 nt, synthetic construct
  source 1..23: mol_type = other RNA
aatgcttgatgatacaatgaatg

SEQ ID NO: 13719 - RNA, 23 nt, synthetic construct
  source 1..23: mol_type = other RNA
ggtatatggctcctgaaatgctt

SEQ ID NO: 13720 - RNA, 23 nt, synthetic construct
  source 1..23: mol_type = other RNA
tatggctcctgaaatgcttgatg

SEQ ID NO: 13721 - RNA, 23 nt, synthetic construct
  source 1..23: mol_type = other RNA
atggctcctgaaatgcttgatga

SEQ ID NO: 13722 - RNA, 23 nt, synthetic construct
  source 1..23: mol_type = other RNA
tggctcctgaaatgcttgatgat

SEQ ID NO: 13723 - RNA, 23 nt, synthetic construct
  source 1..23: mol_type = other RNA
ggctcctgaaatgcttgatgata

SEQ ID NO: 13724 - RNA, 23 nt, synthetic construct
  source 1..23: mol_type = other RNA
gctcctgaaatgcttgatgatac

SEQ ID NO: 13725 - RNA, 23 nt, synthetic construct
  source 1..23: mol_type = other RNA
ctcctgaaatgcttgatgataca

SEQ ID NO: 13726 - RNA, 23 nt, synthetic construct
  source 1..23: mol_type = other RNA
tcctgaaatgcttgatgatacaa

SEQ ID NO: 13727 - RNA, 23 nt, synthetic construct
  source 1..23: mol_type = other RNA
cctgaaatgcttgatgatacaat

SEQ ID NO: 13728 - RNA, 23 nt, synthetic construct
  source 1..23: mol_type = other RNA
ctgaaatgcttgatgatacaatg

SEQ ID NO: 13729 - RNA, 23 nt, synthetic construct
  source 1..23: mol_type = other RNA
tgaaatgcttgatgatacaatga

SEQ ID NO: 13730 - RNA, 23 nt, synthetic construct
  source 1..23: mol_type = other RNA
gaaatgcttgatgatacaatgaa

SEQ ID NO: 13731 - RNA, 23 nt, synthetic construct
  source 1..23: mol_type = other RNA
aaatgcttgatgatacaatgaat

SEQ ID NO: 13732 - RNA, 23 nt, synthetic construct
  source 1..23: mol_type = other RNA
atgcttgatgatacaatgaatgt

SEQ ID NO: 13733 - RNA, 23 nt, synthetic construct
  source 1..23: mol_type = other RNA
tgcttgatgatacaatgaatgtg

SEQ ID NO: 13734 - RNA, 23 nt, synthetic construct
  source 1..23: mol_type = other RNA
gcttgatgatacaatgaatgtga

SEQ ID NO: 13735 - RNA, 23 nt, synthetic construct
  source 1..23: mol_type = other RNA
cttgatgatacaatgaatgtgaa

SEQ ID NO: 13736 - RNA, 23 nt, synthetic construct
  source 1..23: mol_type = other RNA
ttgatgatacaatgaatgtgaat

SEQ ID NO: 13737 - RNA, 23 nt, synthetic construct
  source 1..23: mol_type = other RNA
tgatgatacaatgaatgtgaata

SEQ ID NO: 13738 - RNA, 23 nt, synthetic construct
  source 1..23: mol_type = other RNA
gatgatacaatgaatgtgaatat

SEQ ID NO: 13739 - RNA, 23 nt, synthetic construct
  source 1..23: mol_type = other RNA
tgatacaatgaatgtgaatatct

SEQ ID NO: 13740 - RNA, 23 nt, synthetic construct
  source 1..23: mol_type = other RNA
gatacaatgaatgtgaatatctt

SEQ ID NO: 13741 - RNA, 23 nt, synthetic construct
  source 1..23: mol_type = other RNA
gtgaatatctttgagtccttcaa

SEQ ID NO: 13742 - RNA, 23 nt, synthetic construct
  source 1..23: mol_type = other RNA
ctgacatctattctgttggtctg

SEQ ID NO: 13743 - RNA, 23 nt, synthetic construct
  source 1..23: mol_type = other RNA
acaatgaatgtgaatatctttga

SEQ ID NO: 13744 - RNA, 23 nt, synthetic construct
  source 1..23: mol_type = other RNA
caatgaatgtgaatatctttgag

SEQ ID NO: 13745 - RNA, 23 nt, synthetic construct
  source 1..23: mol_type = other RNA
aatgaatgtgaatatctttgagt

SEQ ID NO: 13746 - RNA, 23 nt, synthetic construct
  source 1..23: mol_type = other RNA
atgaatgtgaatatctttgagtc

SEQ ID NO: 13747 - RNA, 23 nt, synthetic construct
  source 1..23: mol_type = other RNA
tgaatgtgaatatctttgagtcc

SEQ ID NO: 13748 - RNA, 23 nt, synthetic construct
  source 1..23: mol_type = other RNA
gaatgtgaatatctttgagtcct

SEQ ID NO: 13749 - RNA, 23 nt, synthetic construct
  source 1..23: mol_type = other RNA
aatgtgaatatctttgagtcctt

SEQ ID NO: 13750 - RNA, 23 nt, synthetic construct
  source 1..23: mol_type = other RNA
atgtgaatatctttgagtccttc

SEQ ID NO: 13751 - RNA, 23 nt, synthetic construct
  source 1..23: mol_type = other RNA
tgtgaatatctttgagtccttca

SEQ ID NO: 13752 - RNA, 23 nt, synthetic construct
  source 1..23: mol_type = other RNA
tgaatatctttgagtccttcaaa

SEQ ID NO: 13753 - RNA, 23 nt, synthetic construct
  source 1..23: mol_type = other RNA
gaatatctttgagtccttcaaac

SEQ ID NO: 13754 - RNA, 23 nt, synthetic construct
  source 1..23: mol_type = other RNA
aatatctttgagtccttcaaacg

SEQ ID NO: 13755 - RNA, 23 nt, synthetic construct
  source 1..23: mol_type = other RNA
atatctttgagtccttcaaacga

SEQ ID NO: 13756 - RNA, 23 nt, synthetic construct
  source 1..23: mol_type = other RNA
tatctttgagtccttcaaacgag

SEQ ID NO: 13757 - RNA, 23 nt, synthetic construct
  source 1..23: mol_type = other RNA
atctttgagtccttcaaacgagc

SEQ ID NO: 13758 - RNA, 23 nt, synthetic construct
  source 1..23: mol_type = other RNA
ccttcaaacgagctgacatctat

SEQ ID NO: 13759 - RNA, 23 nt, synthetic construct
  source 1..23: mol_type = other RNA
caaacgagctgacatctattctg

SEQ ID NO: 13760 - RNA, 23 nt, synthetic construct
  source 1..23: mol_type = other RNA
aaacgagctgacatctattctgt

SEQ ID NO: 13761 - RNA, 23 nt, synthetic construct
  source 1..23: mol_type = other RNA
aacgagctgacatctattctgtt

SEQ ID NO: 13762 - RNA, 23 nt, synthetic construct
  source 1..23: mol_type = other RNA
cgagctgacatctattctgttgg

SEQ ID NO: 13763 - RNA, 23 nt, synthetic construct
  source 1..23: mol_type = other RNA
gagctgacatctattctgttggt

SEQ ID NO: 13764 - RNA, 23 nt, synthetic construct
  source 1..23: mol_type = other RNA
tctattctgttggtctggtttac

SEQ ID NO: 13765 - RNA, 23 nt, synthetic construct
  source 1..23: mol_type = other RNA
tggtctggtttactgggaaatag

SEQ ID NO: 13766 - RNA, 23 nt, synthetic construct
  source 1..23: mol_type = other RNA
gttgaggagtaccaattgcctta

SEQ ID NO: 13767 - RNA, 23 nt, synthetic construct
  source 1..23: mol_type = other RNA
aggagtaccaattgccttattat

SEQ ID NO: 13768 - RNA, 23 nt, synthetic construct
  source 1..23: mol_type = other RNA
ttgaggagtaccaattgccttat

SEQ ID NO: 13769 - RNA, 23 nt, synthetic construct
  source 1..23: mol_type = other RNA
tgaggagtaccaattgccttatt

SEQ ID NO: 13770 - RNA, 23 nt, synthetic construct
  source 1..23: mol_type = other RNA
gaggagtaccaattgccttatta

SEQ ID NO: 13771 - RNA, 23 nt, synthetic construct
  source 1..23: mol_type = other RNA
ggagtaccaattgccttattatg

SEQ ID NO: 13772 - RNA, 23 nt, synthetic construct
  source 1..23: mol_type = other RNA
gagtaccaattgccttattatga

SEQ ID NO: 13773 - RNA, 23 nt, synthetic construct
  source 1..23: mol_type = other RNA
agtaccaattgccttattatgac

SEQ ID NO: 13774 - RNA, 23 nt, synthetic construct
  source 1..23: mol_type = other RNA
gtaccaattgccttattatgaca

SEQ ID NO: 13775 - RNA, 23 nt, synthetic construct
  source 1..23: mol_type = other RNA
taccaattgccttattatgacat

SEQ ID NO: 13776 - RNA, 23 nt, synthetic construct
  source 1..23: mol_type = other RNA
accaattgccttattatgacatg

SEQ ID NO: 13777 - RNA, 23 nt, synthetic construct
  source 1..23: mol_type = other RNA
ccaattgccttattatgacatgg

SEQ ID NO: 13778 - RNA, 23 nt, synthetic construct
  source 1..23: mol_type = other RNA
caattgccttattatgacatggt

SEQ ID NO: 13779 - RNA, 23 nt, synthetic construct
  source 1..23: mol_type = other RNA
aattgccttattatgacatggtg

SEQ ID NO: 13780 - RNA, 23 nt, synthetic construct
  source 1..23: mol_type = other RNA
attgccttattatgacatggtgc

SEQ ID NO: 13781 - RNA, 23 nt, synthetic construct
  source 1..23: mol_type = other RNA
ttgccttattatgacatggtgcc

SEQ ID NO: 13782 - RNA, 23 nt, synthetic construct
  source 1..23: mol_type = other RNA
tgccttattatgacatggtgcct

SEQ ID NO: 13783 - RNA, 23 nt, synthetic construct
  source 1..23: mol_type = other RNA
gccttattatgacatggtgcctt

SEQ ID NO: 13784 - RNA, 23 nt, synthetic construct
  source 1..23: mol_type = other RNA
ccttattatgacatggtgccttc

SEQ ID NO: 13785 - RNA, 23 nt, synthetic construct
  source 1..23: mol_type = other RNA
cttattatgacatggtgccttca

SEQ ID NO: 13786 - RNA, 23 nt, synthetic construct
  source 1..23: mol_type = other RNA
ttattatgacatggtgccttcag

SEQ ID NO: 13787 - RNA, 23 nt, synthetic construct
  source 1..23: mol_type = other RNA
cgatagaggaaatgagaaaggtt

SEQ ID NO: 13788 - RNA, 23 nt, synthetic construct
  source 1..23: mol_type = other RNA
tagaggaaatgagaaaggttgtt

SEQ ID NO: 13789 - RNA, 23 nt, synthetic construct
  source 1..23: mol_type = other RNA
gaaaggttgtttgtgaccagaag

SEQ ID NO: 13790 - RNA, 23 nt, synthetic construct
  source 1..23: mol_type = other RNA
agaggaaatgagaaaggttgttt

SEQ ID NO: 13791 - RNA, 23 nt, synthetic construct
  source 1..23: mol_type = other RNA
gaggaaatgagaaaggttgtttg

SEQ ID NO: 13792 - RNA, 23 nt, synthetic construct
  source 1..23: mol_type = other RNA
aggaaatgagaaaggttgtttgt

SEQ ID NO: 13793 - RNA, 23 nt, synthetic construct
  source 1..23: mol_type = other RNA
ggaaatgagaaaggttgtttgtg

SEQ ID NO: 13794 - RNA, 23 nt, synthetic construct
  source 1..23: mol_type = other RNA
gaaatgagaaaggttgtttgtga

SEQ ID NO: 13795 - RNA, 23 nt, synthetic construct
  source 1..23: mol_type = other RNA
aaatgagaaaggttgtttgtgac

SEQ ID NO: 13796 - RNA, 23 nt, synthetic construct
  source 1..23: mol_type = other RNA
aatgagaaaggttgtttgtgacc

SEQ ID NO: 13797 - RNA, 23 nt, synthetic construct
  source 1..23: mol_type = other RNA
atgagaaaggttgtttgtgacca

SEQ ID NO: 13798 - RNA, 23 nt, synthetic construct
  source 1..23: mol_type = other RNA
tgagaaaggttgtttgtgaccag

SEQ ID NO: 13799 - RNA, 23 nt, synthetic construct
  source 1..23: mol_type = other RNA
gagaaaggttgtttgtgaccaga

SEQ ID NO: 13800 - RNA, 23 nt, synthetic construct
  source 1..23: mol_type = other RNA
agaaaggttgtttgtgaccagaa

SEQ ID NO: 13801 - RNA, 23 nt, synthetic construct
  source 1..23: mol_type = other RNA
aaaggttgtttgtgaccagaagt

SEQ ID NO: 13802 - RNA, 23 nt, synthetic construct
  source 1..23: mol_type = other RNA
aaggttgtttgtgaccagaagtt

SEQ ID NO: 13803 - RNA, 23 nt, synthetic construct
  source 1..23: mol_type = other RNA
aggttgtttgtgaccagaagttt

SEQ ID NO: 13804 - RNA, 23 nt, synthetic construct
  source 1..23: mol_type = other RNA
ggttgtttgtgaccagaagtttc

SEQ ID NO: 13805 - RNA, 23 nt, synthetic construct
  source 1..23: mol_type = other RNA
accagaagtttcgaccaagtatc

SEQ ID NO: 13806 - RNA, 23 nt, synthetic construct
  source 1..23: mol_type = other RNA
ccagtggcaaagttgtgaagcac

SEQ ID NO: 13807 - RNA, 23 nt, synthetic construct
  source 1..23: mol_type = other RNA
agtggcaaagttgtgaagcactc

SEQ ID NO: 13808 - RNA, 23 nt, synthetic construct
  source 1..23: mol_type = other RNA
aataatgcgtgagtgttggtatg

SEQ ID NO: 13809 - RNA, 23 nt, synthetic construct
  source 1..23: mol_type = other RNA
ccgcctaactgctcttcgtatta

SEQ ID NO: 13810 - RNA, 23 nt, synthetic construct
  source 1..23: mol_type = other RNA
cgcctaactgctcttcgtattaa

SEQ ID NO: 13811 - RNA, 23 nt, synthetic construct
  source 1..23: mol_type = other RNA
gcctaactgctcttcgtattaag

SEQ ID NO: 13812 - RNA, 23 nt, synthetic construct
  source 1..23: mol_type = other RNA
taactgctcttcgtattaagaag

SEQ ID NO: 13813 - RNA, 23 nt, synthetic construct
  source 1..23: mol_type = other RNA
ctgctcttcgtattaagaagact

SEQ ID NO: 13814 - RNA, 23 nt, synthetic construct
  source 1..23: mol_type = other RNA
tgctcttcgtattaagaagacta

SEQ ID NO: 13815 - RNA, 23 nt, synthetic construct
  source 1..23: mol_type = other RNA
actatatctcaactttgtgtcaa

SEQ ID NO: 13816 - RNA, 23 nt, synthetic construct
  source 1..23: mol_type = other RNA
ctatatctcaactttgtgtcaaa

SEQ ID NO: 13817 - RNA, 23 nt, synthetic construct
  source 1..23: mol_type = other RNA
tatatctcaactttgtgtcaaag

SEQ ID NO: 13818 - RNA, 23 nt, synthetic construct
  source 1..23: mol_type = other RNA
atctcaactttgtgtcaaagaag

SEQ ID NO: 13819 - RNA, 23 nt, synthetic construct
  source 1..23: mol_type = other RNA
caaagcctaatgatgataattat

SEQ ID NO: 13820 - RNA, 23 nt, synthetic construct
  source 1..23: mol_type = other RNA
agaaatctctcatagctttcttt

SEQ ID NO: 13821 - RNA, 23 nt, synthetic construct
  source 1..23: mol_type = other RNA
agactgcaaagcctaatgatgat

SEQ ID NO: 13822 - RNA, 23 nt, synthetic construct
  source 1..23: mol_type = other RNA
gactgcaaagcctaatgatgata

SEQ ID NO: 13823 - RNA, 23 nt, synthetic construct
  source 1..23: mol_type = other RNA
actgcaaagcctaatgatgataa

SEQ ID NO: 13824 - RNA, 23 nt, synthetic construct
  source 1..23: mol_type = other RNA
ctgcaaagcctaatgatgataat

SEQ ID NO: 13825 - RNA, 23 nt, synthetic construct
  source 1..23: mol_type = other RNA
tgcaaagcctaatgatgataatt

SEQ ID NO: 13826 - RNA, 23 nt, synthetic construct
  source 1..23: mol_type = other RNA
gcaaagcctaatgatgataatta

SEQ ID NO: 13827 - RNA, 23 nt, synthetic construct
  source 1..23: mol_type = other RNA
aagcctaatgatgataattatgt

SEQ ID NO: 13828 - RNA, 23 nt, synthetic construct
  source 1..23: mol_type = other RNA
agcctaatgatgataattatgtt

SEQ ID NO: 13829 - RNA, 23 nt, synthetic construct
  source 1..23: mol_type = other RNA
gcctaatgatgataattatgtta

SEQ ID NO: 13830 - RNA, 23 nt, synthetic construct
  source 1..23: mol_type = other RNA
gttaaaaagaaatctctcatagc

SEQ ID NO: 13831 - RNA, 23 nt, synthetic construct
  source 1..23: mol_type = other RNA
ttaaaaagaaatctctcatagct

SEQ ID NO: 13832 - RNA, 23 nt, synthetic construct
  source 1..23: mol_type = other RNA
aaatctctcatagctttcttttc

SEQ ID NO: 13833 - RNA, 23 nt, synthetic construct
  source 1..23: mol_type = other RNA
tctcatagctttcttttccattt

SEQ ID NO: 13834 - RNA, 23 nt, synthetic construct
  source 1..23: mol_type = other RNA
ctcatagctttcttttccatttt

SEQ ID NO: 13835 - RNA, 23 nt, synthetic construct
  source 1..23: mol_type = other RNA
atgtgaatgtttttgccattttt

SEQ ID NO: 13836 - RNA, 23 nt, synthetic construct
  source 1..23: mol_type = other RNA
ccctttatgtgaatgtttttgcc

SEQ ID NO: 13837 - RNA, 23 nt, synthetic construct
  source 1..23: mol_type = other RNA
ttatgtgaatgtttttgccattt

SEQ ID NO: 13838 - RNA, 23 nt, synthetic construct
  source 1..23: mol_type = other RNA
gtgaatgtttttgccattttttt

SEQ ID NO: 13839 - RNA, 23 nt, synthetic construct
  source 1..23: mol_type = other RNA
aaagataagacagtacagtattt

SEQ ID NO: 13840 - RNA, 23 nt, synthetic construct
  source 1..23: mol_type = other RNA
gataagacagtacagtatttaag

SEQ ID NO: 13841 - RNA, 23 nt, synthetic construct
  source 1..23: mol_type = other RNA
taagacagtacagtatttaagtg

SEQ ID NO: 13842 - RNA, 23 nt, synthetic construct
  source 1..23: mol_type = other RNA
ggcagcatgaaaagataactcta

SEQ ID NO: 13843 - RNA, 23 nt, synthetic construct
  source 1..23: mol_type = other RNA
acttcatccaatctctatgttat

SEQ ID NO: 13844 - RNA, 23 nt, synthetic construct
  source 1..23: mol_type = other RNA
agcaacacctcaactcatctttt

SEQ ID NO: 13845 - RNA, 23 nt, synthetic construct
  source 1..23: mol_type = other RNA
gaaagcaacacctcaactcatct

SEQ ID NO: 13846 - RNA, 23 nt, synthetic construct
  source 1..23: mol_type = other RNA
aacacctcaactcatctttttat

SEQ ID NO: 13847 - RNA, 23 nt, synthetic construct
  source 1..23: mol_type = other RNA
cacctcaactcatctttttattt

SEQ ID NO: 13848 - RNA, 23 nt, synthetic construct
  source 1..23: mol_type = other RNA
acctcaactcatctttttattta

SEQ ID NO: 13849 - RNA, 23 nt, synthetic construct
  source 1..23: mol_type = other RNA
gctctataaaaatgttatagtca

SEQ ID NO: 13850 - RNA, 23 nt, synthetic construct
  source 1..23: mol_type = other RNA
acttgaaccaagagcacatgaat

SEQ ID NO: 13851 - RNA, 23 nt, synthetic construct
  source 1..23: mol_type = other RNA
ttattttacttgaaccaagagca

SEQ ID NO: 13852 - RNA, 23 nt, synthetic construct
  source 1..23: mol_type = other RNA
tattttacttgaaccaagagcac

SEQ ID NO: 13853 - RNA, 23 nt, synthetic construct
  source 1..23: mol_type = other RNA
attttacttgaaccaagagcaca

SEQ ID NO: 13854 - RNA, 23 nt, synthetic construct
  source 1..23: mol_type = other RNA
ttttacttgaaccaagagcacat

SEQ ID NO: 13855 - RNA, 23 nt, synthetic construct
  source 1..23: mol_type = other RNA
tttacttgaaccaagagcacatg

SEQ ID NO: 13856 - RNA, 23 nt, synthetic construct
  source 1..23: mol_type = other RNA
ttacttgaaccaagagcacatga

SEQ ID NO: 13857 - RNA, 23 nt, synthetic construct
  source 1..23: mol_type = other RNA
tacttgaaccaagagcacatgaa

SEQ ID NO: 13858 - RNA, 23 nt, synthetic construct
  source 1..23: mol_type = other RNA
cttgaaccaagagcacatgaatg

SEQ ID NO: 13859 - RNA, 23 nt, synthetic construct
  source 1..23: mol_type = other RNA
ttgaaccaagagcacatgaatga

SEQ ID NO: 13860 - RNA, 23 nt, synthetic construct
  source 1..23: mol_type = other RNA
tgaaccaagagcacatgaatgaa

SEQ ID NO: 13861 - RNA, 23 nt, synthetic construct
  source 1..23: mol_type = other RNA
gaaccaagagcacatgaatgaac

SEQ ID NO: 13862 - RNA, 23 nt, synthetic construct
  source 1..23: mol_type = other RNA
aaccaagagcacatgaatgaaca

SEQ ID NO: 13863 - RNA, 23 nt, synthetic construct
  source 1..23: mol_type = other RNA
accaagagcacatgaatgaacag

SEQ ID NO: 13864 - RNA, 23 nt, synthetic construct
  source 1..23: mol_type = other RNA
ccaagagcacatgaatgaacagg

SEQ ID NO: 13865 - RNA, 23 nt, synthetic construct
  source 1..23: mol_type = other RNA
caggaaaagatgtaaaaacattt

SEQ ID NO: 13866 - RNA, 23 nt, synthetic construct
  source 1..23: mol_type = other RNA
catttttttctgagatgaaaaca

SEQ ID NO: 13867 - RNA, 23 nt, synthetic construct
  source 1..23: mol_type = other RNA
acatgcaaattagagcatgctat

SEQ ID NO: 13868 - RNA, 23 nt, synthetic construct
  source 1..23: mol_type = other RNA
catgcaaattagagcatgctatc

SEQ ID NO: 13869 - RNA, 23 nt, synthetic construct
  source 1..23: mol_type = other RNA
gcaaattagagcatgctatcttt

SEQ ID NO: 13870 - RNA, 23 nt, synthetic construct
  source 1..23: mol_type = other RNA
ttagagcatgctatctttaggtg

SEQ ID NO: 13871 - RNA, 23 nt, synthetic construct
  source 1..23: mol_type = other RNA
gagcatgctatctttaggtgatg

SEQ ID NO: 13872 - RNA, 23 nt, synthetic construct
  source 1..23: mol_type = other RNA
tatctttaggtgatgcaatctat

SEQ ID NO: 13873 - RNA, 23 nt, synthetic construct
  source 1..23: mol_type = other RNA
taagttagcaggactttttaaaa

SEQ ID NO: 13874 - RNA, 23 nt, synthetic construct
  source 1..23: mol_type = other RNA
aagttagcaggactttttaaaaa

SEQ ID NO: 13875 - RNA, 23 nt, synthetic construct
  source 1..23: mol_type = other RNA
agttagcaggactttttaaaaat

SEQ ID NO: 13876 - RNA, 23 nt, synthetic construct
  source 1..23: mol_type = other RNA
gttagcaggactttttaaaaata

SEQ ID NO: 13877 - RNA, 23 nt, synthetic construct
  source 1..23: mol_type = other RNA
gctctaaactttaatatatcgaa

SEQ ID NO: 13878 - RNA, 23 nt, synthetic construct
  source 1..23: mol_type = other RNA
tgctctaaactttaatatatcga

SEQ ID NO: 13879 - RNA, 23 nt, synthetic construct
  source 1..23: mol_type = other RNA
ctaaactttaatatatcgaacgt

SEQ ID NO: 13880 - RNA, 23 nt, synthetic construct
  source 1..23: mol_type = other RNA
aaactttaatatatcgaacgtga

SEQ ID NO: 13881 - RNA, 23 nt, synthetic construct
  source 1..23: mol_type = other RNA
aactttaatatatcgaacgtgag

SEQ ID NO: 13882 - RNA, 23 nt, synthetic construct
  source 1..23: mol_type = other RNA
actttaatatatcgaacgtgaga

SEQ ID NO: 13883 - RNA, 23 nt, synthetic construct
  source 1..23: mol_type = other RNA
ctttaatatatcgaacgtgagag

SEQ ID NO: 13884 - RNA, 23 nt, synthetic construct
  source 1..23: mol_type = other RNA
tttaatatatcgaacgtgagagt

SEQ ID NO: 13885 - RNA, 23 nt, synthetic construct
  source 1..23: mol_type = other RNA
ttaatatatcgaacgtgagagtg

SEQ ID NO: 13886 - RNA, 23 nt, synthetic construct
  source 1..23: mol_type = other RNA
taatatatcgaacgtgagagtgg

SEQ ID NO: 13887 - RNA, 23 nt, synthetic construct
  source 1..23: mol_type = other RNA
aatatatcgaacgtgagagtgga

SEQ ID NO: 13888 - RNA, 23 nt, synthetic construct
  source 1..23: mol_type = other RNA
ctgttcttcataatccactactg

SEQ ID NO: 13889 - RNA, 23 nt, synthetic construct
  source 1..23: mol_type = other RNA
gaaccactaaacttgttcctttc

SEQ ID NO: 13890 - RNA, 23 nt, synthetic construct
  source 1..23: mol_type = other RNA
cctgaaccactaaacttgttcct

SEQ ID NO: 13891 - RNA, 23 nt, synthetic construct
  source 1..23: mol_type = other RNA
ctgaaccactaaacttgttcctt

SEQ ID NO: 13892 - RNA, 23 nt, synthetic construct
  source 1..23: mol_type = other RNA
tgaaccactaaacttgttccttt

SEQ ID NO: 13893 - RNA, 23 nt, synthetic construct
  source 1..23: mol_type = other RNA
aaccactaaacttgttcctttca

SEQ ID NO: 13894 - RNA, 23 nt, synthetic construct
  source 1..23: mol_type = other RNA
accactaaacttgttcctttcat

SEQ ID NO: 13895 - RNA, 23 nt, synthetic construct
  source 1..23: mol_type = other RNA
ccactaaacttgttcctttcatt

SEQ ID NO: 13896 - RNA, 23 nt, synthetic construct
  source 1..23: mol_type = other RNA
cactaaacttgttcctttcattt

SEQ ID NO: 13897 - RNA, 23 nt, synthetic construct
  source 1..23: mol_type = other RNA
actaaacttgttcctttcattta

SEQ ID NO: 13898 - RNA, 23 nt, synthetic construct
  source 1..23: mol_type = other RNA
ctaaacttgttcctttcatttac

SEQ ID NO: 13899 - RNA, 23 nt, synthetic construct
  source 1..23: mol_type = other RNA
taaacttgttcctttcatttaca

SEQ ID NO: 13900 - RNA, 23 nt, synthetic construct
  source 1..23: mol_type = other RNA
aaacttgttcctttcatttacaa

SEQ ID NO: 13901 - RNA, 23 nt, synthetic construct
  source 1..23: mol_type = other RNA
aacttgttcctttcatttacaaa

SEQ ID NO: 13902 - RNA, 23 nt, synthetic construct
  source 1..23: mol_type = other RNA
acttgttcctttcatttacaaaa

SEQ ID NO: 13903 - RNA, 23 nt, synthetic construct
  source 1..23: mol_type = other RNA
cttgttcctttcatttacaaaag

SEQ ID NO: 13904 - RNA, 23 nt, synthetic construct
  source 1..23: mol_type = other RNA
ttgttcctttcatttacaaaaga

SEQ ID NO: 13905 - RNA, 23 nt, synthetic construct
  source 1..23: mol_type = other RNA
tgttcctttcatttacaaaagag

SEQ ID NO: 13906 - RNA, 23 nt, synthetic construct
  source 1..23: mol_type = other RNA
gttcctttcatttacaaaagaga

SEQ ID NO: 13907 - RNA, 23 nt, synthetic construct
  source 1..23: mol_type = other RNA
ttcctttcatttacaaaagagat

SEQ ID NO: 13908 - RNA, 23 nt, synthetic construct
  source 1..23: mol_type = other RNA
tcctttcatttacaaaagagata

SEQ ID NO: 13909 - RNA, 23 nt, synthetic construct
  source 1..23: mol_type = other RNA
cctttcatttacaaaagagatac

SEQ ID NO: 13910 - RNA, 23 nt, synthetic construct
  source 1..23: mol_type = other RNA
ctttcatttacaaaagagatacc

SEQ ID NO: 13911 - RNA, 23 nt, synthetic construct
  source 1..23: mol_type = other RNA
tttcatttacaaaagagatacct

SEQ ID NO: 13912 - RNA, 23 nt, synthetic construct
  source 1..23: mol_type = other RNA
ttcatttacaaaagagatacctg

SEQ ID NO: 13913 - RNA, 23 nt, synthetic construct
  source 1..23: mol_type = other RNA
tcatttacaaaagagatacctga

SEQ ID NO: 13914 - RNA, 23 nt, synthetic construct
  source 1..23: mol_type = other RNA
catttacaaaagagatacctgac

SEQ ID NO: 13915 - RNA, 23 nt, synthetic construct
  source 1..23: mol_type = other RNA
atttacaaaagagatacctgaca

SEQ ID NO: 13916 - RNA, 23 nt, synthetic construct
  source 1..23: mol_type = other RNA
tttacaaaagagatacctgacat

SEQ ID NO: 13917 - RNA, 23 nt, synthetic construct
  source 1..23: mol_type = other RNA
ttacaaaagagatacctgacatc

SEQ ID NO: 13918 - RNA, 23 nt, synthetic construct
  source 1..23: mol_type = other RNA
tacaaaagagatacctgacatcc

SEQ ID NO: 13919 - RNA, 23 nt, synthetic construct
  source 1..23: mol_type = other RNA
acaaaagagatacctgacatcct

SEQ ID NO: 13920 - RNA, 23 nt, synthetic construct
  source 1..23: mol_type = other RNA
tcctgagacactgagaaatgtcc

SEQ ID NO: 13921 - RNA, 23 nt, synthetic construct
  source 1..23: mol_type = other RNA
gtcctgaagtcacacagctaatg

SEQ ID NO: 13922 - RNA, 23 nt, synthetic construct
  source 1..23: mol_type = other RNA
catcctgagacactgagaaatgt

SEQ ID NO: 13923 - RNA, 23 nt, synthetic construct
  source 1..23: mol_type = other RNA
ctgagacactgagaaatgtcctg

SEQ ID NO: 13924 - RNA, 23 nt, synthetic construct
  source 1..23: mol_type = other RNA
tgagaaatgtcctgaagtcacac

SEQ ID NO: 13925 - RNA, 23 nt, synthetic construct
  source 1..23: mol_type = other RNA
cttgtgataatgaacaccgtaag

SEQ ID NO: 13926 - RNA, 23 nt, synthetic construct
  source 1..23: mol_type = other RNA
actaggtccaaatcttgtgataa

SEQ ID NO: 13927 - RNA, 23 nt, synthetic construct
  source 1..23: mol_type = other RNA
ctaggtccaaatcttgtgataat

SEQ ID NO: 13928 - RNA, 23 nt, synthetic construct
  source 1..23: mol_type = other RNA
aggtccaaatcttgtgataatga

SEQ ID NO: 13929 - RNA, 23 nt, synthetic construct
  source 1..23: mol_type = other RNA
gtccaaatcttgtgataatgaac

SEQ ID NO: 13930 - RNA, 23 nt, synthetic construct
  source 1..23: mol_type = other RNA
ccaaatcttgtgataatgaacac

SEQ ID NO: 13931 - RNA, 23 nt, synthetic construct
  source 1..23: mol_type = other RNA
aaggttagctagcttcctacttt

SEQ ID NO: 13932 - RNA, 23 nt, synthetic construct
  source 1..23: mol_type = other RNA
aggttagctagcttcctactttc

SEQ ID NO: 13933 - RNA, 23 nt, synthetic construct
  source 1..23: mol_type = other RNA
ctagcttcctactttcccttgaa

SEQ ID NO: 13934 - RNA, 23 nt, synthetic construct
  source 1..23: mol_type = other RNA
ttcctactttcccttgaatagtg

SEQ ID NO: 13935 - RNA, 23 nt, synthetic construct
  source 1..23: mol_type = other RNA
tcctactttcccttgaatagtgc

SEQ ID NO: 13936 - RNA, 23 nt, synthetic construct
  source 1..23: mol_type = other RNA
tttcccttgaatagtgcttttct

SEQ ID NO: 13937 - RNA, 23 nt, synthetic construct
  source 1..23: mol_type = other RNA
ttcccttgaatagtgcttttctc

SEQ ID NO: 13938 - RNA, 23 nt, synthetic construct
  source 1..23: mol_type = other RNA
tcccttgaatagtgcttttctcc

SEQ ID NO: 13939 - RNA, 23 nt, synthetic construct
  source 1..23: mol_type = other RNA
cccttgaatagtgcttttctccc

SEQ ID NO: 13940 - RNA, 23 nt, synthetic construct
  source 1..23: mol_type = other RNA
cttgaatagtgcttttctcccta

SEQ ID NO: 13941 - RNA, 23 nt, synthetic construct
  source 1..23: mol_type = other RNA
gtgcttttctccctatgtaatat

SEQ ID NO: 13942 - RNA, 23 nt, synthetic construct
  source 1..23: mol_type = other RNA
ttagaaggcatattgagttattt

SEQ ID NO: 13943 - RNA, 23 nt, synthetic construct
  source 1..23: mol_type = other RNA
tttgtggtttagaaggcatattg

SEQ ID NO: 13944 - RNA, 23 nt, synthetic construct
  source 1..23: mol_type = other RNA
ggtttagaaggcatattgagtta

SEQ ID NO: 13945 - RNA, 23 nt, synthetic construct
  source 1..23: mol_type = other RNA
tttagaaggcatattgagttatt

SEQ ID NO: 13946 - RNA, 23 nt, synthetic construct
  source 1..23: mol_type = other RNA
ggcatattgagttattttgcaga

SEQ ID NO: 13947 - RNA, 23 nt, synthetic construct
  source 1..23: mol_type = other RNA
gttattttgcagaatcataatgg

SEQ ID NO: 13948 - RNA, 23 nt, synthetic construct
  source 1..23: mol_type = other RNA
ttattttgcagaatcataatgga

SEQ ID NO: 13949 - RNA, 23 nt, synthetic construct
  source 1..23: mol_type = other RNA
tattttgcagaatcataatggac

SEQ ID NO: 13950 - RNA, 23 nt, synthetic construct
  source 1..23: mol_type = other RNA
attttgcagaatcataatggacc

SEQ ID NO: 13951 - RNA, 23 nt, synthetic construct
  source 1..23: mol_type = other RNA
ttttgcagaatcataatggaccc

SEQ ID NO: 13952 - RNA, 23 nt, synthetic construct
  source 1..23: mol_type = other RNA
tttgcagaatcataatggacccg

SEQ ID NO: 13953 - RNA, 23 nt, synthetic construct
  source 1..23: mol_type = other RNA
ttgcagaatcataatggacccgc

SEQ ID NO: 13954 - RNA, 23 nt, synthetic construct
  source 1..23: mol_type = other RNA
tgcagaatcataatggacccgca

SEQ ID NO: 13955 - RNA, 23 nt, synthetic construct
  source 1..23: mol_type = other RNA
gcagaatcataatggacccgcac

SEQ ID NO: 13956 - RNA, 23 nt, synthetic construct
  source 1..23: mol_type = other RNA
cagaatcataatggacccgcaca

SEQ ID NO: 13957 - RNA, 23 nt, synthetic construct
  source 1..23: mol_type = other RNA
agaatcataatggacccgcacaa

SEQ ID NO: 13958 - RNA, 23 nt, synthetic construct
  source 1..23: mol_type = other RNA
gaatcataatggacccgcacaaa

SEQ ID NO: 13959 - RNA, 23 nt, synthetic construct
  source 1..23: mol_type = other RNA
aatcataatggacccgcacaaaa

SEQ ID NO: 13960 - RNA, 23 nt, synthetic construct
  source 1..23: mol_type = other RNA
atcataatggacccgcacaaaat

SEQ ID NO: 13961 - RNA, 23 nt, synthetic construct
  source 1..23: mol_type = other RNA
tcataatggacccgcacaaaatc

SEQ ID NO: 13962 - RNA, 23 nt, synthetic construct
  source 1..23: mol_type = other RNA
aaatctcagaaccatatctgttg

SEQ ID NO: 13963 - RNA, 23 nt, synthetic construct
  source 1..23: mol_type = other RNA
gttgacattttttctcatagaaa

SEQ ID NO: 13964 - RNA, 23 nt, synthetic construct
  source 1..23: mol_type = other RNA
cataatggacccgcacaaaatct

SEQ ID NO: 13965 - RNA, 23 nt, synthetic construct
  source 1..23: mol_type = other RNA
ataatggacccgcacaaaatctc

SEQ ID NO: 13966 - RNA, 23 nt, synthetic construct
  source 1..23: mol_type = other RNA
taatggacccgcacaaaatctca

SEQ ID NO: 13967 - RNA, 23 nt, synthetic construct
  source 1..23: mol_type = other RNA
aatggacccgcacaaaatctcag

SEQ ID NO: 13968 - RNA, 23 nt, synthetic construct
  source 1..23: mol_type = other RNA
atggacccgcacaaaatctcaga

SEQ ID NO: 13969 - RNA, 23 nt, synthetic construct
  source 1..23: mol_type = other RNA
tggacccgcacaaaatctcagaa

SEQ ID NO: 13970 - RNA, 23 nt, synthetic construct
  source 1..23: mol_type = other RNA
ggacccgcacaaaatctcagaac

SEQ ID NO: 13971 - RNA, 23 nt, synthetic construct
  source 1..23: mol_type = other RNA
gacccgcacaaaatctcagaacc

SEQ ID NO: 13972 - RNA, 23 nt, synthetic construct
  source 1..23: mol_type = other RNA
acccgcacaaaatctcagaacca

SEQ ID NO: 13973 - RNA, 23 nt, synthetic construct
  source 1..23: mol_type = other RNA
cccgcacaaaatctcagaaccat

SEQ ID NO: 13974 - RNA, 23 nt, synthetic construct
  source 1..23: mol_type = other RNA
ccgcacaaaatctcagaaccata

SEQ ID NO: 13975 - RNA, 23 nt, synthetic construct
  source 1..23: mol_type = other RNA
cgcacaaaatctcagaaccatat

SEQ ID NO: 13976 - RNA, 23 nt, synthetic construct
  source 1..23: mol_type = other RNA
gcacaaaatctcagaaccatatc

SEQ ID NO: 13977 - RNA, 23 nt, synthetic construct
  source 1..23: mol_type = other RNA
cacaaaatctcagaaccatatct

SEQ ID NO: 13978 - RNA, 23 nt, synthetic construct
  source 1..23: mol_type = other RNA
acaaaatctcagaaccatatctg

SEQ ID NO: 13979 - RNA, 23 nt, synthetic construct
  source 1..23: mol_type = other RNA
caaaatctcagaaccatatctgt

SEQ ID NO: 13980 - RNA, 23 nt, synthetic construct
  source 1..23: mol_type = other RNA
aaaatctcagaaccatatctgtt

SEQ ID NO: 13981 - RNA, 23 nt, synthetic construct
  source 1..23: mol_type = other RNA
aatctcagaaccatatctgttga

SEQ ID NO: 13982 - RNA, 23 nt, synthetic construct
  source 1..23: mol_type = other RNA
atctcagaaccatatctgttgac

SEQ ID NO: 13983 - RNA, 23 nt, synthetic construct
  source 1..23: mol_type = other RNA
tctcagaaccatatctgttgaca

SEQ ID NO: 13984 - RNA, 23 nt, synthetic construct
  source 1..23: mol_type = other RNA
ctcagaaccatatctgttgacat

SEQ ID NO: 13985 - RNA, 23 nt, synthetic construct
  source 1..23: mol_type = other RNA
tcagaaccatatctgttgacatt

SEQ ID NO: 13986 - RNA, 23 nt, synthetic construct
  source 1..23: mol_type = other RNA
cagaaccatatctgttgacattt

SEQ ID NO: 13987 - RNA, 23 nt, synthetic construct
  source 1..23: mol_type = other RNA
agaaccatatctgttgacatttt

SEQ ID NO: 13988 - RNA, 23 nt, synthetic construct
  source 1..23: mol_type = other RNA
gaaccatatctgttgacattttt

SEQ ID NO: 13989 - RNA, 23 nt, synthetic construct
  source 1..23: mol_type = other RNA
aaccatatctgttgacatttttt

SEQ ID NO: 13990 - RNA, 23 nt, synthetic construct
  source 1..23: mol_type = other RNA
accatatctgttgacattttttc

SEQ ID NO: 13991 - RNA, 23 nt, synthetic construct
  source 1..23: mol_type = other RNA
ccatatctgttgacattttttct

SEQ ID NO: 13992 - RNA, 23 nt, synthetic construct
  source 1..23: mol_type = other RNA
catatctgttgacattttttctc

SEQ ID NO: 13993 - RNA, 23 nt, synthetic construct
  source 1..23: mol_type = other RNA
atatctgttgacattttttctca

SEQ ID NO: 13994 - RNA, 23 nt, synthetic construct
  source 1..23: mol_type = other RNA
tatctgttgacattttttctcat

SEQ ID NO: 13995 - RNA, 23 nt, synthetic construct
  source 1..23: mol_type = other RNA
atctgttgacattttttctcata

SEQ ID NO: 13996 - RNA, 23 nt, synthetic construct
  source 1..23: mol_type = other RNA
tctgttgacattttttctcatag

SEQ ID NO: 13997 - RNA, 23 nt, synthetic construct
  source 1..23: mol_type = other RNA
ctgttgacattttttctcataga

SEQ ID NO: 13998 - RNA, 23 nt, synthetic construct
  source 1..23: mol_type = other RNA
tgttgacattttttctcatagaa

SEQ ID NO: 13999 - RNA, 23 nt, synthetic construct
  source 1..23: mol_type = other RNA
tttctcatagaaatatcatggtt

SEQ ID NO: 14000 - RNA, 23 nt, synthetic construct
  source 1..23: mol_type = other RNA
ttctcatagaaatatcatggtta

SEQ ID NO: 14001 - RNA, 23 nt, synthetic construct
  source 1..23: mol_type = other RNA
tctcatagaaatatcatggttac

SEQ ID NO: 14002 - RNA, 23 nt, synthetic construct
  source 1..23: mol_type = other RNA
cccatttgttaatgagcattaat

SEQ ID NO: 14003 - RNA, 23 nt, synthetic construct
  source 1..23: mol_type = other RNA
taatgagcattaatgttttctga

SEQ ID NO: 14004 - RNA, 23 nt, synthetic construct
  source 1..23: mol_type = other RNA
ctgaacacttccaaagattaatc

SEQ ID NO: 14005 - RNA, 23 nt, synthetic construct
  source 1..23: mol_type = other RNA
catttgttaatgagcattaatgt

SEQ ID NO: 14006 - RNA, 23 nt, synthetic construct
  source 1..23: mol_type = other RNA
gttaatgagcattaatgttttct

SEQ ID NO: 14007 - RNA, 23 nt, synthetic construct
  source 1..23: mol_type = other RNA
aatgagcattaatgttttctgaa

SEQ ID NO: 14008 - RNA, 23 nt, synthetic construct
  source 1..23: mol_type = other RNA
atgagcattaatgttttctgaac

SEQ ID NO: 14009 - RNA, 23 nt, synthetic construct
  source 1..23: mol_type = other RNA
tgagcattaatgttttctgaaca

SEQ ID NO: 14010 - RNA, 23 nt, synthetic construct
  source 1..23: mol_type = other RNA
gagcattaatgttttctgaacac

SEQ ID NO: 14011 - RNA, 23 nt, synthetic construct
  source 1..23: mol_type = other RNA
agcattaatgttttctgaacact

SEQ ID NO: 14012 - RNA, 23 nt, synthetic construct
  source 1..23: mol_type = other RNA
gcattaatgttttctgaacactt

SEQ ID NO: 14013 - RNA, 23 nt, synthetic construct
  source 1..23: mol_type = other RNA
cattaatgttttctgaacacttc

SEQ ID NO: 14014 - RNA, 23 nt, synthetic construct
  source 1..23: mol_type = other RNA
tttctgaacacttccaaagatta

SEQ ID NO: 14015 - RNA, 23 nt, synthetic construct
  source 1..23: mol_type = other RNA
ttctgaacacttccaaagattaa

SEQ ID NO: 14016 - RNA, 23 nt, synthetic construct
  source 1..23: mol_type = other RNA
tctgaacacttccaaagattaat

SEQ ID NO: 14017 - RNA, 23 nt, synthetic construct
  source 1..23: mol_type = other RNA
tgaacacttccaaagattaatca

SEQ ID NO: 14018 - RNA, 23 nt, synthetic construct
  source 1..23: mol_type = other RNA
gaacacttccaaagattaatcaa

SEQ ID NO: 14019 - RNA, 23 nt, synthetic construct
  source 1..23: mol_type = other RNA
aacacttccaaagattaatcaaa

SEQ ID NO: 14020 - RNA, 23 nt, synthetic construct
  source 1..23: mol_type = other RNA
acacttccaaagattaatcaaac

SEQ ID NO: 14021 - RNA, 23 nt, synthetic construct
  source 1..23: mol_type = other RNA
cacttccaaagattaatcaaaca

SEQ ID NO: 14022 - RNA, 23 nt, synthetic construct
  source 1..23: mol_type = other RNA
acttccaaagattaatcaaacat

SEQ ID NO: 14023 - RNA, 23 nt, synthetic construct
  source 1..23: mol_type = other RNA
cttccaaagattaatcaaacata

SEQ ID NO: 14024 - RNA, 23 nt, synthetic construct
  source 1..23: mol_type = other RNA
cattgtctgaaaatgtctttaag

SEQ ID NO: 14025 - RNA, 23 nt, synthetic construct
  source 1..23: mol_type = other RNA
atattcattgtctgaaaatgtct

SEQ ID NO: 14026 - RNA, 23 nt, synthetic construct
  source 1..23: mol_type = other RNA
ttcattgtctgaaaatgtcttta

SEQ ID NO: 14027 - RNA, 23 nt, synthetic construct
  source 1..23: mol_type = other RNA
tcattgtctgaaaatgtctttaa

SEQ ID NO: 14028 - RNA, 23 nt, synthetic construct
  source 1..23: mol_type = other RNA
ttgtctgaaaatgtctttaagat

SEQ ID NO: 14029 - RNA, 23 nt, synthetic construct
  source 1..23: mol_type = other RNA
gtctgaaaatgtctttaagatac

SEQ ID NO: 14030 - RNA, 23 nt, synthetic construct
  source 1..23: mol_type = other RNA
agaggtccctatttcctttgtac

SEQ ID NO: 14031 - RNA, 23 nt, synthetic construct
  source 1..23: mol_type = other RNA
gaggtccctatttcctttgtaca

SEQ ID NO: 14032 - RNA, 23 nt, synthetic construct
  source 1..23: mol_type = other RNA
aggtccctatttcctttgtacat

SEQ ID NO: 14033 - RNA, 23 nt, synthetic construct
  source 1..23: mol_type = other RNA
ggtccctatttcctttgtacata

SEQ ID NO: 14034 - RNA, 23 nt, synthetic construct
  source 1..23: mol_type = other RNA
gtccctatttcctttgtacatac

SEQ ID NO: 14035 - RNA, 23 nt, synthetic construct
  source 1..23: mol_type = other RNA
tccctatttcctttgtacataca

SEQ ID NO: 14036 - RNA, 23 nt, synthetic construct
  source 1..23: mol_type = other RNA
ccctatttcctttgtacatacac

SEQ ID NO: 14037 - RNA, 23 nt, synthetic construct
  source 1..23: mol_type = other RNA
cctatttcctttgtacatacaca

SEQ ID NO: 14038 - RNA, 23 nt, synthetic construct
  source 1..23: mol_type = other RNA
cacacttagaaagaaaagacaga

SEQ ID NO: 14039 - RNA, 23 nt, synthetic construct
  source 1..23: mol_type = other RNA
acacttagaaagaaaagacagaa

SEQ ID NO: 14040 - RNA, 23 nt, synthetic construct
  source 1..23: mol_type = other RNA
cacttagaaagaaaagacagaaa

SEQ ID NO: 14041 - RNA, 23 nt, synthetic construct
  source 1..23: mol_type = other RNA
acttagaaagaaaagacagaaaa

SEQ ID NO: 14042 - RNA, 23 nt, synthetic construct
  source 1..23: mol_type = other RNA
cttagaaagaaaagacagaaaag

SEQ ID NO: 14043 - RNA, 23 nt, synthetic construct
  source 1..23: mol_type = other RNA
aagaggaaggaaggaaatatttt

SEQ ID NO: 14044 - RNA, 23 nt, synthetic construct
  source 1..23: mol_type = other RNA
agaggaaggaaggaaatattttg

SEQ ID NO: 14045 - RNA, 23 nt, synthetic construct
  source 1..23: mol_type = other RNA
aaggaaggaaatattttgagaat

SEQ ID NO: 14046 - RNA, 23 nt, synthetic construct
  source 1..23: mol_type = other RNA
ctcttcaatgaagtgttaacaac

SEQ ID NO: 14047 - RNA, 23 nt, synthetic construct
  source 1..23: mol_type = other RNA
gagaagaattaagaaaactcttc

SEQ ID NO: 14048 - RNA, 23 nt, synthetic construct
  source 1..23: mol_type = other RNA
gaaaactcttcaatgaagtgtta

SEQ ID NO: 14049 - RNA, 23 nt, synthetic construct
  source 1..23: mol_type = other RNA
tcaatgaagtgttaacaaccaaa

SEQ ID NO: 14050 - RNA, 23 nt, synthetic construct
  source 1..23: mol_type = other RNA
caatgaagtgttaacaaccaaac

SEQ ID NO: 14051 - RNA, 23 nt, synthetic construct
  source 1..23: mol_type = other RNA
gacggtatcagaaacagcaaata

SEQ ID NO: 14052 - RNA, 23 nt, synthetic construct
  source 1..23: mol_type = other RNA
cctacagacggtatcagaaacag

SEQ ID NO: 14053 - RNA, 23 nt, synthetic construct
  source 1..23: mol_type = other RNA
gtatcagaaacagcaaatagata

SEQ ID NO: 14054 - RNA, 23 nt, synthetic construct
  source 1..23: mol_type = other RNA
atcagaaacagcaaatagatatt

SEQ ID NO: 14055 - RNA, 23 nt, synthetic construct
  source 1..23: mol_type = other RNA
tcagaaacagcaaatagatattc

SEQ ID NO: 14056 - RNA, 23 nt, synthetic construct
  source 1..23: mol_type = other RNA
cagaaacagcaaatagatattcc

SEQ ID NO: 14057 - RNA, 23 nt, synthetic construct
  source 1..23: mol_type = other RNA
gaaacagcaaatagatattcctc

SEQ ID NO: 14058 - RNA, 23 nt, synthetic construct
  source 1..23: mol_type = other RNA
aacagcaaatagatattcctcta

SEQ ID NO: 14059 - RNA, 23 nt, synthetic construct
  source 1..23: mol_type = other RNA
acagcaaatagatattcctctac

SEQ ID NO: 14060 - RNA, 23 nt, synthetic construct
  source 1..23: mol_type = other RNA
agcaaatagatattcctctaccc

SEQ ID NO: 14061 - RNA, 23 nt, synthetic construct
  source 1..23: mol_type = other RNA
agtgagtacagaagaatgctcat

SEQ ID NO: 14062 - RNA, 23 nt, synthetic construct
  source 1..23: mol_type = other RNA
gagtacagaagaatgctcatgat

SEQ ID NO: 14063 - RNA, 23 nt, synthetic construct
  source 1..23: mol_type = other RNA
agtacagaagaatgctcatgata

SEQ ID NO: 14064 - RNA, 23 nt, synthetic construct
  source 1..23: mol_type = other RNA
gtacagaagaatgctcatgatag

SEQ ID NO: 14065 - RNA, 23 nt, synthetic construct
  source 1..23: mol_type = other RNA
agaagaatgctcatgatagtttt

SEQ ID NO: 14066 - RNA, 23 nt, synthetic construct
  source 1..23: mol_type = other RNA
gaagaatgctcatgatagttttg

SEQ ID NO: 14067 - RNA, 23 nt, synthetic construct
  source 1..23: mol_type = other RNA
agaatgctcatgatagttttgcc

SEQ ID NO: 14068 - RNA, 23 nt, synthetic construct
  source 1..23: mol_type = other RNA
atgctcatgatagttttgccttc

SEQ ID NO: 14069 - RNA, 23 nt, synthetic construct
  source 1..23: mol_type = other RNA
gctcatgatagttttgccttcat

SEQ ID NO: 14070 - RNA, 23 nt, synthetic construct
  source 1..23: mol_type = other RNA
tcatgatagttttgccttcattc

SEQ ID NO: 14071 - RNA, 23 nt, synthetic construct
  source 1..23: mol_type = other RNA
catgatagttttgccttcattct

SEQ ID NO: 14072 - RNA, 23 nt, synthetic construct
  source 1..23: mol_type = other RNA
tgatagttttgccttcattctac

SEQ ID NO: 14073 - RNA, 23 nt, synthetic construct
  source 1..23: mol_type = other RNA
tgtggacacagagtaatgaatat

SEQ ID NO: 14074 - RNA, 23 nt, synthetic construct
  source 1..23: mol_type = other RNA
ggacacagagtaatgaatattta

SEQ ID NO: 14075 - RNA, 23 nt, synthetic construct
  source 1..23: mol_type = other RNA
agagtaatgaatatttaatggga

SEQ ID NO: 14076 - RNA, 23 nt, synthetic construct
  source 1..23: mol_type = other RNA
ttaatgggacattaaatatgccc

SEQ ID NO: 14077 - RNA, 23 nt, synthetic construct
  source 1..23: mol_type = other RNA
taatgggacattaaatatgccct

SEQ ID NO: 14078 - RNA, 23 nt, synthetic construct
  source 1..23: mol_type = other RNA
aatgggacattaaatatgccctt

SEQ ID NO: 14079 - RNA, 23 nt, synthetic construct
  source 1..23: mol_type = other RNA
atgggacattaaatatgcccttc

SEQ ID NO: 14080 - RNA, 23 nt, synthetic construct
  source 1..23: mol_type = other RNA
ctttggtaaacgagatttaacat

SEQ ID NO: 14081 - RNA, 23 nt, synthetic construct
  source 1..23: mol_type = other RNA
tgggacattaaatatgcccttca

SEQ ID NO: 14082 - RNA, 23 nt, synthetic construct
  source 1..23: mol_type = other RNA
gggacattaaatatgcccttcaa

SEQ ID NO: 14083 - RNA, 23 nt, synthetic construct
  source 1..23: mol_type = other RNA
ggacattaaatatgcccttcaaa

SEQ ID NO: 14084 - RNA, 23 nt, synthetic construct
  source 1..23: mol_type = other RNA
gacattaaatatgcccttcaaat

SEQ ID NO: 14085 - RNA, 23 nt, synthetic construct
  source 1..23: mol_type = other RNA
acattaaatatgcccttcaaatc

SEQ ID NO: 14086 - RNA, 23 nt, synthetic construct
  source 1..23: mol_type = other RNA
cattaaatatgcccttcaaatct

SEQ ID NO: 14087 - RNA, 23 nt, synthetic construct
  source 1..23: mol_type = other RNA
attaaatatgcccttcaaatcta

SEQ ID NO: 14088 - RNA, 23 nt, synthetic construct
  source 1..23: mol_type = other RNA
atgcccttcaaatctataatttt

SEQ ID NO: 14089 - RNA, 23 nt, synthetic construct
  source 1..23: mol_type = other RNA
tgcccttcaaatctataatttta

SEQ ID NO: 14090 - RNA, 23 nt, synthetic construct
  source 1..23: mol_type = other RNA
taattttactttggtaaacgaga

SEQ ID NO: 14091 - RNA, 23 nt, synthetic construct
  source 1..23: mol_type = other RNA
aattttactttggtaaacgagat

SEQ ID NO: 14092 - RNA, 23 nt, synthetic construct
  source 1..23: mol_type = other RNA
attttactttggtaaacgagatt

SEQ ID NO: 14093 - RNA, 23 nt, synthetic construct
  source 1..23: mol_type = other RNA
ttttactttggtaaacgagattt

SEQ ID NO: 14094 - RNA, 23 nt, synthetic construct
  source 1..23: mol_type = other RNA
tttactttggtaaacgagattta

SEQ ID NO: 14095 - RNA, 23 nt, synthetic construct
  source 1..23: mol_type = other RNA
tactttggtaaacgagatttaac

SEQ ID NO: 14096 - RNA, 23 nt, synthetic construct
  source 1..23: mol_type = other RNA
ttggtaaacgagatttaacatga

SEQ ID NO: 14097 - RNA, 23 nt, synthetic construct
  source 1..23: mol_type = other RNA
acgagatttaacatgatgtcttt

SEQ ID NO: 14098 - RNA, 23 nt, synthetic construct
  source 1..23: mol_type = other RNA
tcttttttcaaactccattcctt

SEQ ID NO: 14099 - RNA, 23 nt, synthetic construct
  source 1..23: mol_type = other RNA
atgtcttttatgctcctaaaaca

SEQ ID NO: 14100 - RNA, 23 nt, synthetic construct
  source 1..23: mol_type = other RNA
catcttttttcaaactccattcc

SEQ ID NO: 14101 - RNA, 23 nt, synthetic construct
  source 1..23: mol_type = other RNA
atcttttttcaaactccattcct

SEQ ID NO: 14102 - RNA, 23 nt, synthetic construct
  source 1..23: mol_type = other RNA
cttttttcaaactccattcctta

SEQ ID NO: 14103 - RNA, 23 nt, synthetic construct
  source 1..23: mol_type = other RNA
ttttttcaaactccattccttag

SEQ ID NO: 14104 - RNA, 23 nt, synthetic construct
  source 1..23: mol_type = other RNA
tttttcaaactccattccttaga

SEQ ID NO: 14105 - RNA, 23 nt, synthetic construct
  source 1..23: mol_type = other RNA
ttttcaaactccattccttagaa

SEQ ID NO: 14106 - RNA, 23 nt, synthetic construct
  source 1..23: mol_type = other RNA
tttcaaactccattccttagaac

SEQ ID NO: 14107 - RNA, 23 nt, synthetic construct
  source 1..23: mol_type = other RNA
ttcaaactccattccttagaaca

SEQ ID NO: 14108 - RNA, 23 nt, synthetic construct
  source 1..23: mol_type = other RNA
tcaaactccattccttagaacat

SEQ ID NO: 14109 - RNA, 23 nt, synthetic construct
  source 1..23: mol_type = other RNA
caaactccattccttagaacatt

SEQ ID NO: 14110 - RNA, 23 nt, synthetic construct
  source 1..23: mol_type = other RNA
aaactccattccttagaacattc

SEQ ID NO: 14111 - RNA, 23 nt, synthetic construct
  source 1..23: mol_type = other RNA
aactccattccttagaacattct

SEQ ID NO: 14112 - RNA, 23 nt, synthetic construct
  source 1..23: mol_type = other RNA
actccattccttagaacattctt

SEQ ID NO: 14113 - RNA, 23 nt, synthetic construct
  source 1..23: mol_type = other RNA
ctccattccttagaacattcttc

SEQ ID NO: 14114 - RNA, 23 nt, synthetic construct
  source 1..23: mol_type = other RNA
tccattccttagaacattcttct

SEQ ID NO: 14115 - RNA, 23 nt, synthetic construct
  source 1..23: mol_type = other RNA
ccattccttagaacattcttcta

SEQ ID NO: 14116 - RNA, 23 nt, synthetic construct
  source 1..23: mol_type = other RNA
cattccttagaacattcttctac

SEQ ID NO: 14117 - RNA, 23 nt, synthetic construct
  source 1..23: mol_type = other RNA
attccttagaacattcttctact

SEQ ID NO: 14118 - RNA, 23 nt, synthetic construct
  source 1..23: mol_type = other RNA
ttccttagaacattcttctactg

SEQ ID NO: 14119 - RNA, 23 nt, synthetic construct
  source 1..23: mol_type = other RNA
tccttagaacattcttctactga

SEQ ID NO: 14120 - RNA, 23 nt, synthetic construct
  source 1..23: mol_type = other RNA
ccttagaacattcttctactgag

SEQ ID NO: 14121 - RNA, 23 nt, synthetic construct
  source 1..23: mol_type = other RNA
ttcttctactgagatgatccaag

SEQ ID NO: 14122 - RNA, 23 nt, synthetic construct
  source 1..23: mol_type = other RNA
ggtacttgcttataaagtgatag

SEQ ID NO: 14123 - RNA, 23 nt, synthetic construct
  source 1..23: mol_type = other RNA
cttagaacattcttctactgaga

SEQ ID NO: 14124 - RNA, 23 nt, synthetic construct
  source 1..23: mol_type = other RNA
ttagaacattcttctactgagat

SEQ ID NO: 14125 - RNA, 23 nt, synthetic construct
  source 1..23: mol_type = other RNA
tagaacattcttctactgagatg

SEQ ID NO: 14126 - RNA, 23 nt, synthetic construct
  source 1..23: mol_type = other RNA
aacattcttctactgagatgatc

SEQ ID NO: 14127 - RNA, 23 nt, synthetic construct
  source 1..23: mol_type = other RNA
acattcttctactgagatgatcc

SEQ ID NO: 14128 - RNA, 23 nt, synthetic construct
  source 1..23: mol_type = other RNA
cattcttctactgagatgatcca

SEQ ID NO: 14129 - RNA, 23 nt, synthetic construct
  source 1..23: mol_type = other RNA
attcttctactgagatgatccaa

SEQ ID NO: 14130 - RNA, 23 nt, synthetic construct
  source 1..23: mol_type = other RNA
tcttctactgagatgatccaaga

SEQ ID NO: 14131 - RNA, 23 nt, synthetic construct
  source 1..23: mol_type = other RNA
cttctactgagatgatccaagac

SEQ ID NO: 14132 - RNA, 23 nt, synthetic construct
  source 1..23: mol_type = other RNA
ttctactgagatgatccaagacc

SEQ ID NO: 14133 - RNA, 23 nt, synthetic construct
  source 1..23: mol_type = other RNA
tctactgagatgatccaagacca

SEQ ID NO: 14134 - RNA, 23 nt, synthetic construct
  source 1..23: mol_type = other RNA
ctactgagatgatccaagaccaa

SEQ ID NO: 14135 - RNA, 23 nt, synthetic construct
  source 1..23: mol_type = other RNA
tactgagatgatccaagaccaaa

SEQ ID NO: 14136 - RNA, 23 nt, synthetic construct
  source 1..23: mol_type = other RNA
atccaagaccaaaagtgttcttt

SEQ ID NO: 14137 - RNA, 23 nt, synthetic construct
  source 1..23: mol_type = other RNA
tccaagaccaaaagtgttctttg

SEQ ID NO: 14138 - RNA, 23 nt, synthetic construct
  source 1..23: mol_type = other RNA
ccaagaccaaaagtgttctttgg

SEQ ID NO: 14139 - RNA, 23 nt, synthetic construct
  source 1..23: mol_type = other RNA
caagaccaaaagtgttctttggt

SEQ ID NO: 14140 - RNA, 23 nt, synthetic construct
  source 1..23: mol_type = other RNA
aagaccaaaagtgttctttggta

SEQ ID NO: 14141 - RNA, 23 nt, synthetic construct
  source 1..23: mol_type = other RNA
agaccaaaagtgttctttggtac

SEQ ID NO: 14142 - RNA, 23 nt, synthetic construct
  source 1..23: mol_type = other RNA
gaccaaaagtgttctttggtact

SEQ ID NO: 14143 - RNA, 23 nt, synthetic construct
  source 1..23: mol_type = other RNA
accaaaagtgttctttggtactt

SEQ ID NO: 14144 - RNA, 23 nt, synthetic construct
  source 1..23: mol_type = other RNA
ccaaaagtgttctttggtacttg

SEQ ID NO: 14145 - RNA, 23 nt, synthetic construct
  source 1..23: mol_type = other RNA
caaaagtgttctttggtacttgc

SEQ ID NO: 14146 - RNA, 23 nt, synthetic construct
  source 1..23: mol_type = other RNA
aaaagtgttctttggtacttgct

SEQ ID NO: 14147 - RNA, 23 nt, synthetic construct
  source 1..23: mol_type = other RNA
gttctttggtacttgcttataaa

SEQ ID NO: 14148 - RNA, 23 nt, synthetic construct
  source 1..23: mol_type = other RNA
ttctttggtacttgcttataaag

SEQ ID NO: 14149 - RNA, 23 nt, synthetic construct
  source 1..23: mol_type = other RNA
ctttggtacttgcttataaagtg

SEQ ID NO: 14150 - RNA, 23 nt, synthetic construct
  source 1..23: mol_type = other RNA
tttggtacttgcttataaagtga

SEQ ID NO: 14151 - RNA, 23 nt, synthetic construct
  source 1..23: mol_type = other RNA
acttgcttataaagtgatagtac

SEQ ID NO: 14152 - RNA, 23 nt, synthetic construct
  source 1..23: mol_type = other RNA
gtacatgttagcatataatgtat

SEQ ID NO: 14153 - RNA, 23 nt, synthetic construct
  source 1..23: mol_type = other RNA
tgcttataaagtgatagtacatg

SEQ ID NO: 14154 - RNA, 23 nt, synthetic construct
  source 1..23: mol_type = other RNA
gcttataaagtgatagtacatgt

SEQ ID NO: 14155 - RNA, 23 nt, synthetic construct
  source 1..23: mol_type = other RNA
cttataaagtgatagtacatgtt

SEQ ID NO: 14156 - RNA, 23 nt, synthetic construct
  source 1..23: mol_type = other RNA
ataaagtgatagtacatgttagc

SEQ ID NO: 14157 - RNA, 23 nt, synthetic construct
  source 1..23: mol_type = other RNA
taaagtgatagtacatgttagca

SEQ ID NO: 14158 - RNA, 23 nt, synthetic construct
  source 1..23: mol_type = other RNA
aaagtgatagtacatgttagcat

SEQ ID NO: 14159 - RNA, 23 nt, synthetic construct
  source 1..23: mol_type = other RNA
aagtgatagtacatgttagcata

SEQ ID NO: 14160 - RNA, 23 nt, synthetic construct
  source 1..23: mol_type = other RNA
agtgatagtacatgttagcatat

SEQ ID NO: 14161 - RNA, 23 nt, synthetic construct
  source 1..23: mol_type = other RNA
gtgatagtacatgttagcatata

SEQ ID NO: 14162 - RNA, 23 nt, synthetic construct
  source 1..23: mol_type = other RNA
tgatagtacatgttagcatataa

SEQ ID NO: 14163 - RNA, 23 nt, synthetic construct
  source 1..23: mol_type = other RNA
gatagtacatgttagcatataat

SEQ ID NO: 14164 - RNA, 23 nt, synthetic construct
  source 1..23: mol_type = other RNA
tagtacatgttagcatataatgt

SEQ ID NO: 14165 - RNA, 23 nt, synthetic construct
  source 1..23: mol_type = other RNA
agtacatgttagcatataatgta

SEQ ID NO: 14166 - RNA, 23 nt, synthetic construct
  source 1..23: mol_type = other RNA
gcatataatgtattttgaagagt

SEQ ID NO: 14167 - RNA, 23 nt, synthetic construct
  source 1..23: mol_type = other RNA
gtattttgaagagtgaagtaaat

SEQ ID NO: 14168 - RNA, 23 nt, synthetic construct
  source 1..23: mol_type = other RNA
attttgaagagtgaagtaaatgc

SEQ ID NO: 14169 - RNA, 23 nt, synthetic construct
  source 1..23: mol_type = other RNA
ttttgaagagtgaagtaaatgct

SEQ ID NO: 14170 - RNA, 23 nt, synthetic construct
  source 1..23: mol_type = other RNA
tttgaagagtgaagtaaatgcta

SEQ ID NO: 14171 - RNA, 23 nt, synthetic construct
  source 1..23: mol_type = other RNA
ttgaagagtgaagtaaatgctat

SEQ ID NO: 14172 - RNA, 23 nt, synthetic construct
  source 1..23: mol_type = other RNA
tgaagagtgaagtaaatgctatt

SEQ ID NO: 14173 - RNA, 23 nt, synthetic construct
  source 1..23: mol_type = other RNA
gaagagtgaagtaaatgctattg

SEQ ID NO: 14174 - RNA, 23 nt, synthetic construct
  source 1..23: mol_type = other RNA
aagagtgaagtaaatgctattga

SEQ ID NO: 14175 - RNA, 23 nt, synthetic construct
  source 1..23: mol_type = other RNA
agagtgaagtaaatgctattgat

SEQ ID NO: 14176 - RNA, 23 nt, synthetic construct
  source 1..23: mol_type = other RNA
gagtgaagtaaatgctattgata

SEQ ID NO: 14177 - RNA, 23 nt, synthetic construct
  source 1..23: mol_type = other RNA
agtgaagtaaatgctattgataa

SEQ ID NO: 14178 - RNA, 23 nt, synthetic construct
  source 1..23: mol_type = other RNA
gtgaagtaaatgctattgataac

SEQ ID NO: 14179 - RNA, 23 nt, synthetic construct
  source 1..23: mol_type = other RNA
ataacagtaaagaaatgctactt

SEQ ID NO: 14180 - RNA, 23 nt, synthetic construct
  source 1..23: mol_type = other RNA
actaataacagtaaagaaatgct

SEQ ID NO: 14181 - RNA, 23 nt, synthetic construct
  source 1..23: mol_type = other RNA
ctaataacagtaaagaaatgcta

SEQ ID NO: 14182 - RNA, 23 nt, synthetic construct
  source 1..23: mol_type = other RNA
aataacagtaaagaaatgctact

SEQ ID NO: 14183 - RNA, 23 nt, synthetic construct
  source 1..23: mol_type = other RNA
taacagtaaagaaatgctacttg

SEQ ID NO: 14184 - RNA, 23 nt, synthetic construct
  source 1..23: mol_type = other RNA
aacagtaaagaaatgctacttga

SEQ ID NO: 14185 - RNA, 23 nt, synthetic construct
  source 1..23: mol_type = other RNA
acagtaaagaaatgctacttgat

SEQ ID NO: 14186 - RNA, 23 nt, synthetic construct
  source 1..23: mol_type = other RNA
cagtaaagaaatgctacttgatt

SEQ ID NO: 14187 - RNA, 23 nt, synthetic construct
  source 1..23: mol_type = other RNA
agtaaagaaatgctacttgattt

SEQ ID NO: 14188 - RNA, 23 nt, synthetic construct
  source 1..23: mol_type = other RNA
gtaaagaaatgctacttgatttt

SEQ ID NO: 14189 - RNA, 23 nt, synthetic construct
  source 1..23: mol_type = other RNA
taaactggattgctcagattacc

SEQ ID NO: 14190 - RNA, 23 nt, synthetic construct
  source 1..23: mol_type = other RNA
ggattgctcagattacctgatcg

SEQ ID NO: 14191 - RNA, 23 nt, synthetic construct
  source 1..23: mol_type = other RNA
ctcagattacctgatcgtggtgg

SEQ ID NO: 14192 - RNA, 23 nt, synthetic construct
  source 1..23: mol_type = other RNA
tcagattacctgatcgtggtgga

SEQ ID NO: 14193 - RNA, 23 nt, synthetic construct
  source 1..23: mol_type = other RNA
cagattacctgatcgtggtggaa

SEQ ID NO: 14194 - RNA, 23 nt, synthetic construct
  source 1..23: mol_type = other RNA
agattacctgatcgtggtggaac

SEQ ID NO: 14195 - RNA, 23 nt, synthetic construct
  source 1..23: mol_type = other RNA
gattacctgatcgtggtggaacc

SEQ ID NO: 14196 - RNA, 23 nt, synthetic construct
  source 1..23: mol_type = other RNA
attacctgatcgtggtggaaccc

SEQ ID NO: 14197 - RNA, 23 nt, synthetic construct
  source 1..23: mol_type = other RNA
ttacctgatcgtggtggaaccct

SEQ ID NO: 14198 - RNA, 23 nt, synthetic construct
  source 1..23: mol_type = other RNA
tacctgatcgtggtggaaccctt

SEQ ID NO: 14199 - RNA, 23 nt, synthetic construct
  source 1..23: mol_type = other RNA
ttaactgttctataaagcaaagc

SEQ ID NO: 14200 - RNA, 23 nt, synthetic construct
  source 1..23: mol_type = other RNA
actatcccatatttaactgttct

SEQ ID NO: 14201 - RNA, 23 nt, synthetic construct
  source 1..23: mol_type = other RNA
ctatcccatatttaactgttcta

SEQ ID NO: 14202 - RNA, 23 nt, synthetic construct
  source 1..23: mol_type = other RNA
tatcccatatttaactgttctat

SEQ ID NO: 14203 - RNA, 23 nt, synthetic construct
  source 1..23: mol_type = other RNA
atcccatatttaactgttctata

SEQ ID NO: 14204 - RNA, 23 nt, synthetic construct
  source 1..23: mol_type = other RNA
tcccatatttaactgttctataa

SEQ ID NO: 14205 - RNA, 23 nt, synthetic construct
  source 1..23: mol_type = other RNA
cccatatttaactgttctataaa

SEQ ID NO: 14206 - RNA, 23 nt, synthetic construct
  source 1..23: mol_type = other RNA
taactgttctataaagcaaagca

SEQ ID NO: 14207 - RNA, 23 nt, synthetic construct
  source 1..23: mol_type = other RNA
aactgttctataaagcaaagcac

SEQ ID NO: 14208 - RNA, 23 nt, synthetic construct
  source 1..23: mol_type = other RNA
actgttctataaagcaaagcaca

SEQ ID NO: 14209 - RNA, 23 nt, synthetic construct
  source 1..23: mol_type = other RNA
ctgttctataaagcaaagcacag

SEQ ID NO: 14210 - RNA, 23 nt, synthetic construct
  source 1..23: mol_type = other RNA
tgttctataaagcaaagcacagc

SEQ ID NO: 14211 - RNA, 23 nt, synthetic construct
  source 1..23: mol_type = other RNA
gttctataaagcaaagcacagct

SEQ ID NO: 14212 - RNA, 23 nt, synthetic construct
  source 1..23: mol_type = other RNA
ttctataaagcaaagcacagctt

SEQ ID NO: 14213 - RNA, 23 nt, synthetic construct
  source 1..23: mol_type = other RNA
tctataaagcaaagcacagcttg

SEQ ID NO: 14214 - RNA, 23 nt, synthetic construct
  source 1..23: mol_type = other RNA
gcgttctgaaggatatacttctg

SEQ ID NO: 14215 - RNA, 23 nt, synthetic construct
  source 1..23: mol_type = other RNA
ttctgtattttctcatagagtac

SEQ ID NO: 14216 - RNA, 23 nt, synthetic construct
  source 1..23: mol_type = other RNA
cacagcttgggtaatagcgttct

SEQ ID NO: 14217 - RNA, 23 nt, synthetic construct
  source 1..23: mol_type = other RNA
acagcttgggtaatagcgttctg

SEQ ID NO: 14218 - RNA, 23 nt, synthetic construct
  source 1..23: mol_type = other RNA
cagcttgggtaatagcgttctga

SEQ ID NO: 14219 - RNA, 23 nt, synthetic construct
  source 1..23: mol_type = other RNA
agcttgggtaatagcgttctgaa

SEQ ID NO: 14220 - RNA, 23 nt, synthetic construct
  source 1..23: mol_type = other RNA
gcttgggtaatagcgttctgaag

SEQ ID NO: 14221 - RNA, 23 nt, synthetic construct
  source 1..23: mol_type = other RNA
cttgggtaatagcgttctgaagg

SEQ ID NO: 14222 - RNA, 23 nt, synthetic construct
  source 1..23: mol_type = other RNA
ttgggtaatagcgttctgaagga

SEQ ID NO: 14223 - RNA, 23 nt, synthetic construct
  source 1..23: mol_type = other RNA
tgggtaatagcgttctgaaggat

SEQ ID NO: 14224 - RNA, 23 nt, synthetic construct
  source 1..23: mol_type = other RNA
gggtaatagcgttctgaaggata

SEQ ID NO: 14225 - RNA, 23 nt, synthetic construct
  source 1..23: mol_type = other RNA
ggtaatagcgttctgaaggatat

SEQ ID NO: 14226 - RNA, 23 nt, synthetic construct
  source 1..23: mol_type = other RNA
gtaatagcgttctgaaggatata

SEQ ID NO: 14227 - RNA, 23 nt, synthetic construct
  source 1..23: mol_type = other RNA
taatagcgttctgaaggatatac

SEQ ID NO: 14228 - RNA, 23 nt, synthetic construct
  source 1..23: mol_type = other RNA
aatagcgttctgaaggatatact

SEQ ID NO: 14229 - RNA, 23 nt, synthetic construct
  source 1..23: mol_type = other RNA
atagcgttctgaaggatatactt

SEQ ID NO: 14230 - RNA, 23 nt, synthetic construct
  source 1..23: mol_type = other RNA
tagcgttctgaaggatatacttc

SEQ ID NO: 14231 - RNA, 23 nt, synthetic construct
  source 1..23: mol_type = other RNA
agcgttctgaaggatatacttct

SEQ ID NO: 14232 - RNA, 23 nt, synthetic construct
  source 1..23: mol_type = other RNA
cgttctgaaggatatacttctgt

SEQ ID NO: 14233 - RNA, 23 nt, synthetic construct
  source 1..23: mol_type = other RNA
gttctgaaggatatacttctgta

SEQ ID NO: 14234 - RNA, 23 nt, synthetic construct
  source 1..23: mol_type = other RNA
ttctgaaggatatacttctgtat

SEQ ID NO: 14235 - RNA, 23 nt, synthetic construct
  source 1..23: mol_type = other RNA
tctgaaggatatacttctgtatt

SEQ ID NO: 14236 - RNA, 23 nt, synthetic construct
  source 1..23: mol_type = other RNA
ctgaaggatatacttctgtattt

SEQ ID NO: 14237 - RNA, 23 nt, synthetic construct
  source 1..23: mol_type = other RNA
tgaaggatatacttctgtatttt

SEQ ID NO: 14238 - RNA, 23 nt, synthetic construct
  source 1..23: mol_type = other RNA
gaaggatatacttctgtattttc

SEQ ID NO: 14239 - RNA, 23 nt, synthetic construct
  source 1..23: mol_type = other RNA
aaggatatacttctgtattttct

SEQ ID NO: 14240 - RNA, 23 nt, synthetic construct
  source 1..23: mol_type = other RNA
aggatatacttctgtattttctc

SEQ ID NO: 14241 - RNA, 23 nt, synthetic construct
  source 1..23: mol_type = other RNA
ggatatacttctgtattttctca

SEQ ID NO: 14242 - RNA, 23 nt, synthetic construct
  source 1..23: mol_type = other RNA
gatatacttctgtattttctcat

SEQ ID NO: 14243 - RNA, 23 nt, synthetic construct
  source 1..23: mol_type = other RNA
atacttctgtattttctcataga

SEQ ID NO: 14244 - RNA, 23 nt, synthetic construct
  source 1..23: mol_type = other RNA
tacttctgtattttctcatagag

SEQ ID NO: 14245 - RNA, 23 nt, synthetic construct
  source 1..23: mol_type = other RNA
acttctgtattttctcatagagt

SEQ ID NO: 14246 - RNA, 23 nt, synthetic construct
  source 1..23: mol_type = other RNA
cttctgtattttctcatagagta

SEQ ID NO: 14247 - RNA, 23 nt, synthetic construct
  source 1..23: mol_type = other RNA
ttctcatagagtacaatttagtg

SEQ ID NO: 14248 - RNA, 23 nt, synthetic construct
  source 1..23: mol_type = other RNA
tctcatagagtacaatttagtga

SEQ ID NO: 14249 - RNA, 23 nt, synthetic construct
  source 1..23: mol_type = other RNA
ctcatagagtacaatttagtgat

SEQ ID NO: 14250 - RNA, 23 nt, synthetic construct
  source 1..23: mol_type = other RNA
tcatagagtacaatttagtgatt

SEQ ID NO: 14251 - RNA, 23 nt, synthetic construct
  source 1..23: mol_type = other RNA
catagagtacaatttagtgatta

SEQ ID NO: 14252 - RNA, 23 nt, synthetic construct
  source 1..23: mol_type = other RNA
agagtacaatttagtgattatgc

SEQ ID NO: 14253 - RNA, 23 nt, synthetic construct
  source 1..23: mol_type = other RNA
tgattatgcttcatttcactatg

SEQ ID NO: 14254 - RNA, 23 nt, synthetic construct
  source 1..23: mol_type = other RNA
gagtacaatttagtgattatgct

SEQ ID NO: 14255 - RNA, 23 nt, synthetic construct
  source 1..23: mol_type = other RNA
agtacaatttagtgattatgctt

SEQ ID NO: 14256 - RNA, 23 nt, synthetic construct
  source 1..23: mol_type = other RNA
gtacaatttagtgattatgcttc

SEQ ID NO: 14257 - RNA, 23 nt, synthetic construct
  source 1..23: mol_type = other RNA
ttagtgattatgcttcatttcac

SEQ ID NO: 14258 - RNA, 23 nt, synthetic construct
  source 1..23: mol_type = other RNA
tagtgattatgcttcatttcact

SEQ ID NO: 14259 - RNA, 23 nt, synthetic construct
  source 1..23: mol_type = other RNA
agtgattatgcttcatttcacta

SEQ ID NO: 14260 - RNA, 23 nt, synthetic construct
  source 1..23: mol_type = other RNA
gtgattatgcttcatttcactat

SEQ ID NO: 14261 - RNA, 23 nt, synthetic construct
  source 1..23: mol_type = other RNA
gattatgcttcatttcactatgg

SEQ ID NO: 14262 - RNA, 23 nt, synthetic construct
  source 1..23: mol_type = other RNA
attatgcttcatttcactatgga

SEQ ID NO: 14263 - RNA, 23 nt, synthetic construct
  source 1..23: mol_type = other RNA
ttatgcttcatttcactatggaa

SEQ ID NO: 14264 - RNA, 23 nt, synthetic construct
  source 1..23: mol_type = other RNA
tatgcttcatttcactatggaaa

SEQ ID NO: 14265 - RNA, 23 nt, synthetic construct
  source 1..23: mol_type = other RNA
atgcttcatttcactatggaaat

SEQ ID NO: 14266 - RNA, 23 nt, synthetic construct
  source 1..23: mol_type = other RNA
tgcttcatttcactatggaaata

SEQ ID NO: 14267 - RNA, 23 nt, synthetic construct
  source 1..23: mol_type = other RNA
gcttcatttcactatggaaatat

SEQ ID NO: 14268 - RNA, 23 nt, synthetic construct
  source 1..23: mol_type = other RNA
cttcatttcactatggaaatatg

SEQ ID NO: 14269 - RNA, 23 nt, synthetic construct
  source 1..23: mol_type = other RNA
catttcactatggaaatatgtta

SEQ ID NO: 14270 - RNA, 23 nt, synthetic construct
  source 1..23: mol_type = other RNA
tcactatggaaatatgttactga

SEQ ID NO: 14271 - RNA, 23 nt, synthetic construct
  source 1..23: mol_type = other RNA
cactatggaaatatgttactgaa

SEQ ID NO: 14272 - RNA, 23 nt, synthetic construct
  source 1..23: mol_type = other RNA
actatggaaatatgttactgaat

SEQ ID NO: 14273 - RNA, 23 nt, synthetic construct
  source 1..23: mol_type = other RNA
ctatggaaatatgttactgaatc

SEQ ID NO: 14274 - RNA, 23 nt, synthetic construct
  source 1..23: mol_type = other RNA
ctgacagctatggagtttgcgtg

SEQ ID NO: 14275 - RNA, 23 nt, synthetic construct
  source 1..23: mol_type = other RNA
aaactgacagctatggagtttgc

SEQ ID NO: 14276 - RNA, 23 nt, synthetic construct
  source 1..23: mol_type = other RNA
aactgacagctatggagtttgcg

SEQ ID NO: 14277 - RNA, 23 nt, synthetic construct
  source 1..23: mol_type = other RNA
actgacagctatggagtttgcgt

SEQ ID NO: 14278 - RNA, 23 nt, synthetic construct
  source 1..23: mol_type = other RNA
tgacagctatggagtttgcgtgt

SEQ ID NO: 14279 - RNA, 23 nt, synthetic construct
  source 1..23: mol_type = other RNA
gacagctatggagtttgcgtgta

SEQ ID NO: 14280 - RNA, 23 nt, synthetic construct
  source 1..23: mol_type = other RNA
acagctatggagtttgcgtgtac

SEQ ID NO: 14281 - RNA, 23 nt, synthetic construct
  source 1..23: mol_type = other RNA
cagctatggagtttgcgtgtact

SEQ ID NO: 14282 - RNA, 23 nt, synthetic construct
  source 1..23: mol_type = other RNA
agctatggagtttgcgtgtactt

SEQ ID NO: 14283 - RNA, 23 nt, synthetic construct
  source 1..23: mol_type = other RNA
gctatggagtttgcgtgtacttc

SEQ ID NO: 14284 - RNA, 23 nt, synthetic construct
  source 1..23: mol_type = other RNA
ctatggagtttgcgtgtacttcc

SEQ ID NO: 14285 - RNA, 23 nt, synthetic construct
  source 1..23: mol_type = other RNA
tactcgttaatgctctcatccac

SEQ ID NO: 14286 - RNA, 23 nt, synthetic construct
  source 1..23: mol_type = other RNA
agtttgcgtgtacttccatactc

SEQ ID NO: 14287 - RNA, 23 nt, synthetic construct
  source 1..23: mol_type = other RNA
tttgcgtgtacttccatactcgt

SEQ ID NO: 14288 - RNA, 23 nt, synthetic construct
  source 1..23: mol_type = other RNA
ttgcgtgtacttccatactcgtt

SEQ ID NO: 14289 - RNA, 23 nt, synthetic construct
  source 1..23: mol_type = other RNA
tgcgtgtacttccatactcgtta

SEQ ID NO: 14290 - RNA, 23 nt, synthetic construct
  source 1..23: mol_type = other RNA
gcgtgtacttccatactcgttaa

SEQ ID NO: 14291 - RNA, 23 nt, synthetic construct
  source 1..23: mol_type = other RNA
cgtgtacttccatactcgttaat

SEQ ID NO: 14292 - RNA, 23 nt, synthetic construct
  source 1..23: mol_type = other RNA
gtgtacttccatactcgttaatg

SEQ ID NO: 14293 - RNA, 23 nt, synthetic construct
  source 1..23: mol_type = other RNA
tgtacttccatactcgttaatgc

SEQ ID NO: 14294 - RNA, 23 nt, synthetic construct
  source 1..23: mol_type = other RNA
gtacttccatactcgttaatgct

SEQ ID NO: 14295 - RNA, 23 nt, synthetic construct
  source 1..23: mol_type = other RNA
tacttccatactcgttaatgctc

SEQ ID NO: 14296 - RNA, 23 nt, synthetic construct
  source 1..23: mol_type = other RNA
acttccatactcgttaatgctct

SEQ ID NO: 14297 - RNA, 23 nt, synthetic construct
  source 1..23: mol_type = other RNA
cttccatactcgttaatgctctc

SEQ ID NO: 14298 - RNA, 23 nt, synthetic construct
  source 1..23: mol_type = other RNA
ttccatactcgttaatgctctca

SEQ ID NO: 14299 - RNA, 23 nt, synthetic construct
  source 1..23: mol_type = other RNA
tccatactcgttaatgctctcat

SEQ ID NO: 14300 - RNA, 23 nt, synthetic construct
  source 1..23: mol_type = other RNA
ccatactcgttaatgctctcatc

SEQ ID NO: 14301 - RNA, 23 nt, synthetic construct
  source 1..23: mol_type = other RNA
actcgttaatgctctcatccact

SEQ ID NO: 14302 - RNA, 23 nt, synthetic construct
  source 1..23: mol_type = other RNA
ctcgttaatgctctcatccactt

SEQ ID NO: 14303 - RNA, 23 nt, synthetic construct
  source 1..23: mol_type = other RNA
tcgttaatgctctcatccactta

SEQ ID NO: 14304 - RNA, 23 nt, synthetic construct
  source 1..23: mol_type = other RNA
cgttaatgctctcatccacttat

SEQ ID NO: 14305 - RNA, 23 nt, synthetic construct
  source 1..23: mol_type = other RNA
gttaatgctctcatccacttatt

SEQ ID NO: 14306 - RNA, 23 nt, synthetic construct
  source 1..23: mol_type = other RNA
ttaatgctctcatccacttatta

SEQ ID NO: 14307 - RNA, 23 nt, synthetic construct
  source 1..23: mol_type = other RNA
taatgctctcatccacttattaa

SEQ ID NO: 14308 - RNA, 23 nt, synthetic construct
  source 1..23: mol_type = other RNA
aatgctctcatccacttattaaa

SEQ ID NO: 14309 - RNA, 23 nt, synthetic construct
  source 1..23: mol_type = other RNA
atgctctcatccacttattaaat

SEQ ID NO: 14310 - RNA, 23 nt, synthetic construct
  source 1..23: mol_type = other RNA
tgctctcatccacttattaaata

SEQ ID NO: 14311 - RNA, 23 nt, synthetic construct
  source 1..23: mol_type = other RNA
gctctcatccacttattaaataa

SEQ ID NO: 14312 - RNA, 23 nt, synthetic construct
  source 1..23: mol_type = other RNA
ctctcatccacttattaaataat

SEQ ID NO: 14313 - RNA, 23 nt, synthetic construct
  source 1..23: mol_type = other RNA
tattaaataatcatagagcaccc

SEQ ID NO: 14314 - RNA, 23 nt, synthetic construct
  source 1..23: mol_type = other RNA
attaaataatcatagagcaccca

SEQ ID NO: 14315 - RNA, 23 nt, synthetic construct
  source 1..23: mol_type = other RNA
ttaaataatcatagagcacccat

SEQ ID NO: 14316 - RNA, 23 nt, synthetic construct
  source 1..23: mol_type = other RNA
taaataatcatagagcacccata

SEQ ID NO: 14317 - RNA, 23 nt, synthetic construct
  source 1..23: mol_type = other RNA
aaataatcatagagcacccatat

SEQ ID NO: 14318 - RNA, 23 nt, synthetic construct
  source 1..23: mol_type = other RNA
aataatcatagagcacccatatc

SEQ ID NO: 14319 - RNA, 23 nt, synthetic construct
  source 1..23: mol_type = other RNA
tagagcacccatatcttgcttgc

SEQ ID NO: 14320 - RNA, 23 nt, synthetic construct
  source 1..23: mol_type = other RNA
ccatatcttgcttgccacaatat

SEQ ID NO: 14321 - RNA, 23 nt, synthetic construct
  source 1..23: mol_type = other RNA
agataggtcctgccctcagggat

SEQ ID NO: 14322 - RNA, 23 nt, synthetic construct
  source 1..23: mol_type = other RNA
gataggtcctgccctcagggatt

SEQ ID NO: 14323 - RNA, 23 nt, synthetic construct
  source 1..23: mol_type = other RNA
ataggtcctgccctcagggattt

SEQ ID NO: 14324 - RNA, 23 nt, synthetic construct
  source 1..23: mol_type = other RNA
taggtcctgccctcagggatttt

SEQ ID NO: 14325 - RNA, 23 nt, synthetic construct
  source 1..23: mol_type = other RNA
aggtcctgccctcagggatttta

SEQ ID NO: 14326 - RNA, 23 nt, synthetic construct
  source 1..23: mol_type = other RNA
ggtcctgccctcagggattttaa

SEQ ID NO: 14327 - RNA, 23 nt, synthetic construct
  source 1..23: mol_type = other RNA
gtcctgccctcagggattttaaa

SEQ ID NO: 14328 - RNA, 23 nt, synthetic construct
  source 1..23: mol_type = other RNA
tcctgccctcagggattttaaag

SEQ ID NO: 14329 - RNA, 23 nt, synthetic construct
  source 1..23: mol_type = other RNA
cctgccctcagggattttaaagt

SEQ ID NO: 14330 - RNA, 23 nt, synthetic construct
  source 1..23: mol_type = other RNA
ctgccctcagggattttaaagtc

SEQ ID NO: 14331 - RNA, 23 nt, synthetic construct
  source 1..23: mol_type = other RNA
tgccctcagggattttaaagtct

SEQ ID NO: 14332 - RNA, 23 nt, synthetic construct
  source 1..23: mol_type = other RNA
tcagggattttaaagtctaattt

SEQ ID NO: 14333 - RNA, 23 nt, synthetic construct
  source 1..23: mol_type = other RNA
cagggattttaaagtctaatttg

SEQ ID NO: 14334 - RNA, 23 nt, synthetic construct
  source 1..23: mol_type = other RNA
aattgacagataaaatacgaagt

SEQ ID NO: 14335 - RNA, 23 nt, synthetic construct
  source 1..23: mol_type = other RNA
gggaagagattaaattgacagat

SEQ ID NO: 14336 - RNA, 23 nt, synthetic construct
  source 1..23: mol_type = other RNA
ggaagagattaaattgacagata

SEQ ID NO: 14337 - RNA, 23 nt, synthetic construct
  source 1..23: mol_type = other RNA
gaagagattaaattgacagataa

SEQ ID NO: 14338 - RNA, 23 nt, synthetic construct
  source 1..23: mol_type = other RNA
attgacagataaaatacgaagtg

SEQ ID NO: 14339 - RNA, 23 nt, synthetic construct
  source 1..23: mol_type = other RNA
ttgacagataaaatacgaagtgg

SEQ ID NO: 14340 - RNA, 23 nt, synthetic construct
  source 1..23: mol_type = other RNA
tgacagataaaatacgaagtggg

SEQ ID NO: 14341 - RNA, 23 nt, synthetic construct
  source 1..23: mol_type = other RNA
acgaagtgggatgtcttgagttc

SEQ ID NO: 14342 - RNA, 23 nt, synthetic construct
  source 1..23: mol_type = other RNA
gaagtgggatgtcttgagttctg

SEQ ID NO: 14343 - RNA, 23 nt, synthetic construct
  source 1..23: mol_type = other RNA
gggatgtcttgagttctgcatga

SEQ ID NO: 14344 - RNA, 23 nt, synthetic construct
  source 1..23: mol_type = other RNA
acagtgggtttctaggataggtc

SEQ ID NO: 14345 - RNA, 23 nt, synthetic construct
  source 1..23: mol_type = other RNA
cagtgggtttctaggataggtct

SEQ ID NO: 14346 - RNA, 23 nt, synthetic construct
  source 1..23: mol_type = other RNA
agtgggtttctaggataggtctg

SEQ ID NO: 14347 - RNA, 23 nt, synthetic construct
  source 1..23: mol_type = other RNA
gtgggtttctaggataggtctga

SEQ ID NO: 14348 - RNA, 23 nt, synthetic construct
  source 1..23: mol_type = other RNA
tgggtttctaggataggtctgaa

SEQ ID NO: 14349 - RNA, 23 nt, synthetic construct
  source 1..23: mol_type = other RNA
gggtttctaggataggtctgaaa

SEQ ID NO: 14350 - RNA, 23 nt, synthetic construct
  source 1..23: mol_type = other RNA
ggtttctaggataggtctgaaaa

SEQ ID NO: 14351 - RNA, 23 nt, synthetic construct
  source 1..23: mol_type = other RNA
gtttctaggataggtctgaaaat

SEQ ID NO: 14352 - RNA, 23 nt, synthetic construct
  source 1..23: mol_type = other RNA
tttctaggataggtctgaaaatt

SEQ ID NO: 14353 - RNA, 23 nt, synthetic construct
  source 1..23: mol_type = other RNA
ttctaggataggtctgaaaattg

SEQ ID NO: 14354 - RNA, 23 nt, synthetic construct
  source 1..23: mol_type = other RNA
tctaggataggtctgaaaattgc

SEQ ID NO: 14355 - RNA, 23 nt, synthetic construct
  source 1..23: mol_type = other RNA
gtctgaaaattgctttcatttgc

SEQ ID NO: 14356 - RNA, 23 nt, synthetic construct
  source 1..23: mol_type = other RNA
aaattgctttcatttgcaacaca

SEQ ID NO: 14357 - RNA, 23 nt, synthetic construct
  source 1..23: mol_type = other RNA
aattgctttcatttgcaacacat

SEQ ID NO: 14358 - RNA, 23 nt, synthetic construct
  source 1..23: mol_type = other RNA
attgctttcatttgcaacacatt

SEQ ID NO: 14359 - RNA, 23 nt, synthetic construct
  source 1..23: mol_type = other RNA
ttgctttcatttgcaacacattt

SEQ ID NO: 14360 - RNA, 23 nt, synthetic construct
  source 1..23: mol_type = other RNA
tgctttcatttgcaacacattta

SEQ ID NO: 14361 - RNA, 23 nt, synthetic construct
  source 1..23: mol_type = other RNA
cagacaatctaaatatatcatca

SEQ ID NO: 14362 - RNA, 23 nt, synthetic construct
  source 1..23: mol_type = other RNA
ttagaaagtagctttatttggat

SEQ ID NO: 14363 - RNA, 23 nt, synthetic construct
  source 1..23: mol_type = other RNA
gaaagtagctttatttggatatt

SEQ ID NO: 14364 - RNA, 23 nt, synthetic construct
  source 1..23: mol_type = other RNA
gacaatctaaatatatcatcagt

SEQ ID NO: 14365 - RNA, 23 nt, synthetic construct
  source 1..23: mol_type = other RNA
aaaagtgcctatgtgaagtgatt

SEQ ID NO: 14366 - RNA, 23 nt, synthetic construct
  source 1..23: mol_type = other RNA
tatcatcagtttttaaaagtgcc

SEQ ID NO: 14367 - RNA, 23 nt, synthetic construct
  source 1..23: mol_type = other RNA
atcatcagtttttaaaagtgcct

SEQ ID NO: 14368 - RNA, 23 nt, synthetic construct
  source 1..23: mol_type = other RNA
tcatcagtttttaaaagtgccta

SEQ ID NO: 14369 - RNA, 23 nt, synthetic construct
  source 1..23: mol_type = other RNA
catcagtttttaaaagtgcctat

SEQ ID NO: 14370 - RNA, 23 nt, synthetic construct
  source 1..23: mol_type = other RNA
atcagtttttaaaagtgcctatg

SEQ ID NO: 14371 - RNA, 23 nt, synthetic construct
  source 1..23: mol_type = other RNA
tcagtttttaaaagtgcctatgt

SEQ ID NO: 14372 - RNA, 23 nt, synthetic construct
  source 1..23: mol_type = other RNA
cagtttttaaaagtgcctatgtg

SEQ ID NO: 14373 - RNA, 23 nt, synthetic construct
  source 1..23: mol_type = other RNA
agtttttaaaagtgcctatgtga

SEQ ID NO: 14374 - RNA, 23 nt, synthetic construct
  source 1..23: mol_type = other RNA
aaagtgcctatgtgaagtgattt

SEQ ID NO: 14375 - RNA, 23 nt, synthetic construct
  source 1..23: mol_type = other RNA
aagtgcctatgtgaagtgatttt

SEQ ID NO: 14376 - RNA, 23 nt, synthetic construct
  source 1..23: mol_type = other RNA
agtgcctatgtgaagtgattttt

SEQ ID NO: 14377 - RNA, 23 nt, synthetic construct
  source 1..23: mol_type = other RNA
gtgcctatgtgaagtgattttta

SEQ ID NO: 14378 - RNA, 23 nt, synthetic construct
  source 1..23: mol_type = other RNA
tgcctatgtgaagtgatttttaa

SEQ ID NO: 14379 - RNA, 23 nt, synthetic construct
  source 1..23: mol_type = other RNA
gcctatgtgaagtgatttttaaa

SEQ ID NO: 14380 - RNA, 23 nt, synthetic construct
  source 1..23: mol_type = other RNA
cctatgtgaagtgatttttaaaa

SEQ ID NO: 14381 - RNA, 23 nt, synthetic construct
  source 1..23: mol_type = other RNA
gtgaagtgatttttaaaaagagc

SEQ ID NO: 14382 - RNA, 23 nt, synthetic construct
  source 1..23: mol_type = other RNA
tgaagtgatttttaaaaagagcc

SEQ ID NO: 14383 - RNA, 23 nt, synthetic construct
  source 1..23: mol_type = other RNA
agtgatttttaaaaagagcctat

SEQ ID NO: 14384 - RNA, 23 nt, synthetic construct
  source 1..23: mol_type = other RNA
gtgatttttaaaaagagcctatg

SEQ ID NO: 14385 - RNA, 23 nt, synthetic construct
  source 1..23: mol_type = other RNA
tgatttttaaaaagagcctatgt

SEQ ID NO: 14386 - RNA, 23 nt, synthetic construct
  source 1..23: mol_type = other RNA
gatttttaaaaagagcctatgtg

SEQ ID NO: 14387 - RNA, 23 nt, synthetic construct
  source 1..23: mol_type = other RNA
atttttaaaaagagcctatgtga

SEQ ID NO: 14388 - RNA, 23 nt, synthetic construct
  source 1..23: mol_type = other RNA
tttttaaaaagagcctatgtgaa

SEQ ID NO: 14389 - RNA, 23 nt, synthetic construct
  source 1..23: mol_type = other RNA
ttttaaaaagagcctatgtgaag

SEQ ID NO: 14390 - RNA, 23 nt, synthetic construct
  source 1..23: mol_type = other RNA
tttaaaaagagcctatgtgaagg

SEQ ID NO: 14391 - RNA, 23 nt, synthetic construct
  source 1..23: mol_type = other RNA
ttaaaaagagcctatgtgaaggg

SEQ ID NO: 14392 - RNA, 23 nt, synthetic construct
  source 1..23: mol_type = other RNA
gggtaatcttgcttgttcttgtt

SEQ ID NO: 14393 - RNA, 23 nt, synthetic construct
  source 1..23: mol_type = other RNA
ggtaatcttgcttgttcttgtta

SEQ ID NO: 14394 - RNA, 23 nt, synthetic construct
  source 1..23: mol_type = other RNA
gtaatcttgcttgttcttgttac

SEQ ID NO: 14395 - RNA, 23 nt, synthetic construct
  source 1..23: mol_type = other RNA
taatcttgcttgttcttgttact

SEQ ID NO: 14396 - RNA, 23 nt, synthetic construct
  source 1..23: mol_type = other RNA
aatcttgcttgttcttgttacta

SEQ ID NO: 14397 - RNA, 23 nt, synthetic construct
  source 1..23: mol_type = other RNA
atcttgcttgttcttgttactaa

SEQ ID NO: 14398 - RNA, 23 nt, synthetic construct
  source 1..23: mol_type = other RNA
tcttgcttgttcttgttactaat

SEQ ID NO: 14399 - RNA, 23 nt, synthetic construct
  source 1..23: mol_type = other RNA
cttgcttgttcttgttactaatt

SEQ ID NO: 14400 - RNA, 23 nt, synthetic construct
  source 1..23: mol_type = other RNA
ttgcttgttcttgttactaattt

SEQ ID NO: 14401 - RNA, 23 nt, synthetic construct
  source 1..23: mol_type = other RNA
tgcttgttcttgttactaatttc

SEQ ID NO: 14402 - RNA, 23 nt, synthetic construct
  source 1..23: mol_type = other RNA
gcttgttcttgttactaatttct

SEQ ID NO: 14403 - RNA, 23 nt, synthetic construct
  source 1..23: mol_type = other RNA
tttctgcatatataagaacgaaa

SEQ ID NO: 14404 - RNA, 23 nt, synthetic construct
  source 1..23: mol_type = other RNA
caagaatgatatttcctgtttta

SEQ ID NO: 14405 - RNA, 23 nt, synthetic construct
  source 1..23: mol_type = other RNA
ggttgtacgtgcctcaaataaac

SEQ ID NO: 14406 - RNA, 23 nt, synthetic construct
  source 1..23: mol_type = other RNA
cgtgcctcaaataaacaagaatg

SEQ ID NO: 14407 - RNA, 23 nt, synthetic construct
  source 1..23: mol_type = other RNA
gtgcctcaaataaacaagaatga

SEQ ID NO: 14408 - RNA, 23 nt, synthetic construct
  source 1..23: mol_type = other RNA
tgcctcaaataaacaagaatgat

SEQ ID NO: 14409 - RNA, 23 nt, synthetic construct
  source 1..23: mol_type = other RNA
gcctcaaataaacaagaatgata

SEQ ID NO: 14410 - RNA, 23 nt, synthetic construct
  source 1..23: mol_type = other RNA
cctcaaataaacaagaatgatat

SEQ ID NO: 14411 - RNA, 23 nt, synthetic construct
  source 1..23: mol_type = other RNA
taaacaagaatgatatttcctgt

SEQ ID NO: 14412 - RNA, 23 nt, synthetic construct
  source 1..23: mol_type = other RNA
aaacaagaatgatatttcctgtt

SEQ ID NO: 14413 - RNA, 23 nt, synthetic construct
  source 1..23: mol_type = other RNA
aacaagaatgatatttcctgttt

SEQ ID NO: 14414 - RNA, 23 nt, synthetic construct
  source 1..23: mol_type = other RNA
acaagaatgatatttcctgtttt

SEQ ID NO: 14415 - RNA, 23 nt, synthetic construct
  source 1..23: mol_type = other RNA
atgttgggtaaatatgcttattg

SEQ ID NO: 14416 - RNA, 23 nt, synthetic construct
  source 1..23: mol_type = other RNA
ttacttatgttgggtaaatatgc

SEQ ID NO: 14417 - RNA, 23 nt, synthetic construct
  source 1..23: mol_type = other RNA
tacttatgttgggtaaatatgct

SEQ ID NO: 14418 - RNA, 23 nt, synthetic construct
  source 1..23: mol_type = other RNA
acttatgttgggtaaatatgctt

SEQ ID NO: 14419 - RNA, 23 nt, synthetic construct
  source 1..23: mol_type = other RNA
cttatgttgggtaaatatgctta

SEQ ID NO: 14420 - RNA, 23 nt, synthetic construct
  source 1..23: mol_type = other RNA
ttatgttgggtaaatatgcttat

SEQ ID NO: 14421 - RNA, 23 nt, synthetic construct
  source 1..23: mol_type = other RNA
tatgttgggtaaatatgcttatt

SEQ ID NO: 14422 - RNA, 23 nt, synthetic construct
  source 1..23: mol_type = other RNA
tattggttcaactttcactctga

SEQ ID NO: 14423 - RNA, 23 nt, synthetic construct
  source 1..23: mol_type = other RNA
tcaactttcactctgaagaaatc

SEQ ID NO: 14424 - RNA, 23 nt, synthetic construct
  source 1..23: mol_type = other RNA
cactctgaagaaatccgtatgtt

SEQ ID NO: 14425 - RNA, 23 nt, synthetic construct
  source 1..23: mol_type = other RNA
ctctgaagaaatccgtatgttag

SEQ ID NO: 14426 - RNA, 23 nt, synthetic construct
  source 1..23: mol_type = other RNA
ttgtgttgtttaactatgactcc

SEQ ID NO: 14427 - RNA, 23 nt, synthetic construct
  source 1..23: mol_type = other RNA
cctaactgagtagtcttatattt

SEQ ID NO: 14428 - RNA, 23 nt, synthetic construct
  source 1..23: mol_type = other RNA
tatgactcctaactgagtagtct

SEQ ID NO: 14429 - RNA, 23 nt, synthetic construct
  source 1..23: mol_type = other RNA
atgactcctaactgagtagtctt

SEQ ID NO: 14430 - RNA, 23 nt, synthetic construct
  source 1..23: mol_type = other RNA
tgactcctaactgagtagtctta

SEQ ID NO: 14431 - RNA, 23 nt, synthetic construct
  source 1..23: mol_type = other RNA
gactcctaactgagtagtcttat

SEQ ID NO: 14432 - RNA, 23 nt, synthetic construct
  source 1..23: mol_type = other RNA
actcctaactgagtagtcttata

SEQ ID NO: 14433 - RNA, 23 nt, synthetic construct
  source 1..23: mol_type = other RNA
ctcctaactgagtagtcttatat

SEQ ID NO: 14434 - RNA, 23 nt, synthetic construct
  source 1..23: mol_type = other RNA
tcctaactgagtagtcttatatt

SEQ ID NO: 14435 - RNA, 23 nt, synthetic construct
  source 1..23: mol_type = other RNA
ctaactgagtagtcttatatttc

SEQ ID NO: 14436 - RNA, 23 nt, synthetic construct
  source 1..23: mol_type = other RNA
taactgagtagtcttatatttca

SEQ ID NO: 14437 - RNA, 23 nt, synthetic construct
  source 1..23: mol_type = other RNA
aactgagtagtcttatatttcaa

SEQ ID NO: 14438 - RNA, 23 nt, synthetic construct
  source 1..23: mol_type = other RNA
actgagtagtcttatatttcaat

SEQ ID NO: 14439 - RNA, 23 nt, synthetic construct
  source 1..23: mol_type = other RNA
ctgagtagtcttatatttcaatt

SEQ ID NO: 14440 - RNA, 23 nt, synthetic construct
  source 1..23: mol_type = other RNA
tcctttactcttaacaggattat

SEQ ID NO: 14441 - RNA, 23 nt, synthetic construct
  source 1..23: mol_type = other RNA
atttcctttactcttaacaggat

SEQ ID NO: 14442 - RNA, 23 nt, synthetic construct
  source 1..23: mol_type = other RNA
tttcctttactcttaacaggatt

SEQ ID NO: 14443 - RNA, 23 nt, synthetic construct
  source 1..23: mol_type = other RNA
ttcctttactcttaacaggatta

SEQ ID NO: 14444 - RNA, 23 nt, synthetic construct
  source 1..23: mol_type = other RNA
cctttactcttaacaggattata

SEQ ID NO: 14445 - RNA, 23 nt, synthetic construct
  source 1..23: mol_type = other RNA
ctttactcttaacaggattatat

SEQ ID NO: 14446 - RNA, 23 nt, synthetic construct
  source 1..23: mol_type = other RNA
ctcttaacaggattatatataga

SEQ ID NO: 14447 - RNA, 23 nt, synthetic construct
  source 1..23: mol_type = other RNA
acaggattatatatagaacatgc

SEQ ID NO: 14448 - RNA, 23 nt, synthetic construct
  source 1..23: mol_type = other RNA
aacatgctcacttacaaaaatag

SEQ ID NO: 14449 - RNA, 23 nt, synthetic construct
  source 1..23: mol_type = other RNA
tcacttacaaaaataggatgatg

SEQ ID NO: 14450 - RNA, 23 nt, synthetic construct
  source 1..23: mol_type = other RNA
gcataaggcaggcttcttgtata

SEQ ID NO: 14451 - RNA, 23 nt, synthetic construct
  source 1..23: mol_type = other RNA
ggcaggcttcttgtatatactta

SEQ ID NO: 14452 - RNA, 23 nt, synthetic construct
  source 1..23: mol_type = other RNA
tgtatatacttatgctgtcaaat

SEQ ID NO: 14453 - RNA, 23 nt, synthetic construct
  source 1..23: mol_type = other RNA
gtatatacttatgctgtcaaatg

SEQ ID NO: 14454 - RNA, 23 nt, synthetic construct
  source 1..23: mol_type = other RNA
tatatacttatgctgtcaaatgt

SEQ ID NO: 14455 - RNA, 23 nt, synthetic construct
  source 1..23: mol_type = other RNA
atatacttatgctgtcaaatgtt

SEQ ID NO: 14456 - RNA, 23 nt, synthetic construct
  source 1..23: mol_type = other RNA
tatacttatgctgtcaaatgtta

SEQ ID NO: 14457 - RNA, 23 nt, synthetic construct
  source 1..23: mol_type = other RNA
atacttatgctgtcaaatgttat

SEQ ID NO: 14458 - RNA, 23 nt, synthetic construct
  source 1..23: mol_type = other RNA
tacttatgctgtcaaatgttata

SEQ ID NO: 14459 - RNA, 23 nt, synthetic construct
  source 1..23: mol_type = other RNA
atgctgtcaaatgttatattgtt

SEQ ID NO: 14460 - RNA, 23 nt, synthetic construct
  source 1..23: mol_type = other RNA
acttatgctgtcaaatgttatat

SEQ ID NO: 14461 - RNA, 23 nt, synthetic construct
  source 1..23: mol_type = other RNA
cttatgctgtcaaatgttatatt

SEQ ID NO: 14462 - RNA, 23 nt, synthetic construct
  source 1..23: mol_type = other RNA
tatgctgtcaaatgttatattgt

SEQ ID NO: 14463 - RNA, 23 nt, synthetic construct
  source 1..23: mol_type = other RNA
tgctgtcaaatgttatattgttt

SEQ ID NO: 14464 - RNA, 23 nt, synthetic construct
  source 1..23: mol_type = other RNA
gctgtcaaatgttatattgtttt

SEQ ID NO: 14465 - RNA, 23 nt, synthetic construct
  source 1..23: mol_type = other RNA
gttatgttcagagtatcagtgtt

SEQ ID NO: 14466 - RNA, 23 nt, synthetic construct
  source 1..23: mol_type = other RNA
ttatgttcagagtatcagtgttc

SEQ ID NO: 14467 - RNA, 23 nt, synthetic construct
  source 1..23: mol_type = other RNA
tatgttcagagtatcagtgttct

SEQ ID NO: 14468 - RNA, 23 nt, synthetic construct
  source 1..23: mol_type = other RNA
atgttcagagtatcagtgttctt

SEQ ID NO: 14469 - RNA, 23 nt, synthetic construct
  source 1..23: mol_type = other RNA
tgttcagagtatcagtgttcttt

SEQ ID NO: 14470 - RNA, 23 nt, synthetic construct
  source 1..23: mol_type = other RNA
gttcagagtatcagtgttcttta

SEQ ID NO: 14471 - RNA, 23 nt, synthetic construct
  source 1..23: mol_type = other RNA
ttcagagtatcagtgttctttac

SEQ ID NO: 14472 - RNA, 23 nt, synthetic construct
  source 1..23: mol_type = other RNA
tcagagtatcagtgttctttact

SEQ ID NO: 14473 - RNA, 23 nt, synthetic construct
  source 1..23: mol_type = other RNA
cagagtatcagtgttctttactc

SEQ ID NO: 14474 - RNA, 23 nt, synthetic construct
  source 1..23: mol_type = other RNA
agagtatcagtgttctttactcc

SEQ ID NO: 14475 - RNA, 23 nt, synthetic construct
  source 1..23: mol_type = other RNA
gagtatcagtgttctttactcct

SEQ ID NO: 14476 - RNA, 23 nt, synthetic construct
  source 1..23: mol_type = other RNA
gttctttactccttacagatatt

SEQ ID NO: 14477 - RNA, 23 nt, synthetic construct
  source 1..23: mol_type = other RNA
ctttactccttacagatattttg

SEQ ID NO: 14478 - RNA, 23 nt, synthetic construct
  source 1..23: mol_type = other RNA
tttaaatgcagcatcactttctg

SEQ ID NO: 14479 - RNA, 23 nt, synthetic construct
  source 1..23: mol_type = other RNA
cagcatcactttctgaaaataag

SEQ ID NO: 14480 - RNA, 23 nt, synthetic construct
  source 1..23: mol_type = other RNA
aagagaaacattatttgttgtca

SEQ ID NO: 14481 - RNA, 23 nt, synthetic construct
  source 1..23: mol_type = other RNA
tttgttgtcagtatttcagcatg

SEQ ID NO: 14482 - RNA, 23 nt, synthetic construct
  source 1..23: mol_type = other RNA
cagtatttcagcatgaacttgtt

SEQ ID NO: 14483 - RNA, 23 nt, synthetic construct
  source 1..23: mol_type = other RNA
tgtaattggtacagattctgttg

SEQ ID NO: 14484 - RNA, 23 nt, synthetic construct
  source 1..23: mol_type = other RNA
gtttgtaattggtacagattctg

SEQ ID NO: 14485 - RNA, 23 nt, synthetic construct
  source 1..23: mol_type = other RNA
tttgtaattggtacagattctgt

SEQ ID NO: 14486 - RNA, 23 nt, synthetic construct
  source 1..23: mol_type = other RNA
ttgtaattggtacagattctgtt

SEQ ID NO: 14487 - RNA, 23 nt, synthetic construct
  source 1..23: mol_type = other RNA
gtaattggtacagattctgttgt

SEQ ID NO: 14488 - RNA, 23 nt, synthetic construct
  source 1..23: mol_type = other RNA
taattggtacagattctgttgta

SEQ ID NO: 14489 - RNA, 23 nt, synthetic construct
  source 1..23: mol_type = other RNA
aattggtacagattctgttgtat

SEQ ID NO: 14490 - RNA, 23 nt, synthetic construct
  source 1..23: mol_type = other RNA
attggtacagattctgttgtatg

SEQ ID NO: 14491 - RNA, 23 nt, synthetic construct
  source 1..23: mol_type = other RNA
ttggtacagattctgttgtatgc

SEQ ID NO: 14492 - RNA, 23 nt, synthetic construct
  source 1..23: mol_type = other RNA
tggtacagattctgttgtatgct

SEQ ID NO: 14493 - RNA, 23 nt, synthetic construct
  source 1..23: mol_type = other RNA
ggtacagattctgttgtatgctt

SEQ ID NO: 14494 - RNA, 23 nt, synthetic construct
  source 1..23: mol_type = other RNA
gtacagattctgttgtatgcttt

SEQ ID NO: 14495 - RNA, 23 nt, synthetic construct
  source 1..23: mol_type = other RNA
tacagattctgttgtatgctttc

SEQ ID NO: 14496 - RNA, 23 nt, synthetic construct
  source 1..23: mol_type = other RNA
gtcacatctagaattcttaattt

SEQ ID NO: 14497 - RNA, 23 nt, synthetic construct
  source 1..23: mol_type = other RNA
acagattctgttgtatgctttct

SEQ ID NO: 14498 - RNA, 23 nt, synthetic construct
  source 1..23: mol_type = other RNA
cagattctgttgtatgctttctt

SEQ ID NO: 14499 - RNA, 23 nt, synthetic construct
  source 1..23: mol_type = other RNA
tttggcatgtcacatctagaatt

SEQ ID NO: 14500 - RNA, 23 nt, synthetic construct
  source 1..23: mol_type = other RNA
ttggcatgtcacatctagaattc

SEQ ID NO: 14501 - RNA, 23 nt, synthetic construct
  source 1..23: mol_type = other RNA
tggcatgtcacatctagaattct

SEQ ID NO: 14502 - RNA, 23 nt, synthetic construct
  source 1..23: mol_type = other RNA
ggcatgtcacatctagaattctt

SEQ ID NO: 14503 - RNA, 23 nt, synthetic construct
  source 1..23: mol_type = other RNA
gcatgtcacatctagaattctta

SEQ ID NO: 14504 - RNA, 23 nt, synthetic construct
  source 1..23: mol_type = other RNA
catgtcacatctagaattcttaa

SEQ ID NO: 14505 - RNA, 23 nt, synthetic construct
  source 1..23: mol_type = other RNA
atgtcacatctagaattcttaat

SEQ ID NO: 14506 - RNA, 23 nt, synthetic construct
  source 1..23: mol_type = other RNA
tgtcacatctagaattcttaatt

SEQ ID NO: 14507 - RNA, 23 nt, synthetic construct
  source 1..23: mol_type = other RNA
tctgacttgagagttaagtgaaa

SEQ ID NO: 14508 - RNA, 23 nt, synthetic construct
  source 1..23: mol_type = other RNA
acttgagagttaagtgaaacatg

SEQ ID NO: 14509 - RNA, 23 nt, synthetic construct
  source 1..23: mol_type = other RNA
catagcacttgcttttcatcttt

SEQ ID NO: 14510 - RNA, 23 nt, synthetic construct
  source 1..23: mol_type = other RNA
ctttgcattttaaatttccatga

SEQ ID NO: 14511 - RNA, 23 nt, synthetic construct
  source 1..23: mol_type = other RNA
gcattttaaatttccatgattgt

SEQ ID NO: 14512 - RNA, 23 nt, synthetic construct
  source 1..23: mol_type = other RNA
cctggttgcagtatctgaaaaaa

SEQ ID NO: 14513 - RNA, 23 nt, synthetic construct
  source 1..23: mol_type = other RNA
ctggttgcagtatctgaaaaaat

SEQ ID NO: 14514 - RNA, 23 nt, synthetic construct
  source 1..23: mol_type = other RNA
tggttgcagtatctgaaaaaatt

SEQ ID NO: 14515 - RNA, 23 nt, synthetic construct
  source 1..23: mol_type = other RNA
ggttgcagtatctgaaaaaatta

SEQ ID NO: 14516 - RNA, 23 nt, synthetic construct
  source 1..23: mol_type = other RNA
gttgcagtatctgaaaaaattaa

SEQ ID NO: 14517 - RNA, 23 nt, synthetic construct
  source 1..23: mol_type = other RNA
agattcattaggttagaagttcc

SEQ ID NO: 14518 - RNA, 23 nt, synthetic construct
  source 1..23: mol_type = other RNA
gttagaagttccagaataattta

SEQ ID NO: 14519 - RNA, 23 nt, synthetic construct
  source 1..23: mol_type = other RNA
acacctactattgtagaattact

SEQ ID NO: 14520 - RNA, 23 nt, synthetic construct
  source 1..23: mol_type = other RNA
aacaaaacaaaactactcctatt

SEQ ID NO: 14521 - RNA, 23 nt, synthetic construct
  source 1..23: mol_type = other RNA
taaaacaaaacaaaactactcct

SEQ ID NO: 14522 - RNA, 23 nt, synthetic construct
  source 1..23: mol_type = other RNA
aaacaaaacaaaactactcctat

SEQ ID NO: 14523 - RNA, 23 nt, synthetic construct
  source 1..23: mol_type = other RNA
acaaaacaaaactactcctattt

SEQ ID NO: 14524 - RNA, 23 nt, synthetic construct
  source 1..23: mol_type = other RNA
caaaacaaaactactcctatttt

SEQ ID NO: 14525 - RNA, 23 nt, synthetic construct
  source 1..23: mol_type = other RNA
aaacaaaactactcctattttcc

SEQ ID NO: 14526 - RNA, 23 nt, synthetic construct
  source 1..23: mol_type = other RNA
aacaaaactactcctattttcct

SEQ ID NO: 14527 - RNA, 23 nt, synthetic construct
  source 1..23: mol_type = other RNA
acaaaactactcctattttcctg

SEQ ID NO: 14528 - RNA, 23 nt, synthetic construct
  source 1..23: mol_type = other RNA
ctattttcctggaattttgccac

SEQ ID NO: 14529 - RNA, 23 nt, synthetic construct
  source 1..23: mol_type = other RNA
ctgatgtttgccattatacaaag

SEQ ID NO: 14530 - RNA, 23 nt, synthetic construct
  source 1..23: mol_type = other RNA
gagtaaacaacttaaaattgctt

SEQ ID NO: 14531 - RNA, 23 nt, synthetic construct
  source 1..23: mol_type = other RNA
tacaaagtttgagtaaacaactt

SEQ ID NO: 14532 - RNA, 23 nt, synthetic construct
  source 1..23: mol_type = other RNA
acaaagtttgagtaaacaactta

SEQ ID NO: 14533 - RNA, 23 nt, synthetic construct
  source 1..23: mol_type = other RNA
caaagtttgagtaaacaacttaa

SEQ ID NO: 14534 - RNA, 23 nt, synthetic construct
  source 1..23: mol_type = other RNA
tgagtaaacaacttaaaattgct

SEQ ID NO: 14535 - RNA, 23 nt, synthetic construct
  source 1..23: mol_type = other RNA
gtaaacaacttaaaattgcttgt

SEQ ID NO: 14536 - RNA, 23 nt, synthetic construct
  source 1..23: mol_type = other RNA
gcatagtctttgattgaaataag

SEQ ID NO: 14537 - RNA, 23 nt, synthetic construct
  source 1..23: mol_type = other RNA
atgagaatgtatttggctaaata

SEQ ID NO: 14538 - RNA, 23 nt, synthetic construct
  source 1..23: mol_type = other RNA
gtcttcaataatcattcctttaa

SEQ ID NO: 14539 - RNA, 23 nt, synthetic construct
  source 1..23: mol_type = other RNA
attcacaaacacatcattacaag

SEQ ID NO: 14540 - RNA, 23 nt, synthetic construct
  source 1..23: mol_type = other RNA
agctggcagttgatgtcttcaat

SEQ ID NO: 14541 - RNA, 23 nt, synthetic construct
  source 1..23: mol_type = other RNA
ctggcagttgatgtcttcaataa

SEQ ID NO: 14542 - RNA, 23 nt, synthetic construct
  source 1..23: mol_type = other RNA
tggcagttgatgtcttcaataat

SEQ ID NO: 14543 - RNA, 23 nt, synthetic construct
  source 1..23: mol_type = other RNA
ggcagttgatgtcttcaataatc

SEQ ID NO: 14544 - RNA, 23 nt, synthetic construct
  source 1..23: mol_type = other RNA
gcagttgatgtcttcaataatca

SEQ ID NO: 14545 - RNA, 23 nt, synthetic construct
  source 1..23: mol_type = other RNA
cagttgatgtcttcaataatcat

SEQ ID NO: 14546 - RNA, 23 nt, synthetic construct
  source 1..23: mol_type = other RNA
agttgatgtcttcaataatcatt

SEQ ID NO: 14547 - RNA, 23 nt, synthetic construct
  source 1..23: mol_type = other RNA
gttgatgtcttcaataatcattc

SEQ ID NO: 14548 - RNA, 23 nt, synthetic construct
  source 1..23: mol_type = other RNA
ttgatgtcttcaataatcattcc

SEQ ID NO: 14549 - RNA, 23 nt, synthetic construct
  source 1..23: mol_type = other RNA
tgatgtcttcaataatcattcct

SEQ ID NO: 14550 - RNA, 23 nt, synthetic construct
  source 1..23: mol_type = other RNA
gatgtcttcaataatcattcctt

SEQ ID NO: 14551 - RNA, 23 nt, synthetic construct
  source 1..23: mol_type = other RNA
atgtcttcaataatcattccttt

SEQ ID NO: 14552 - RNA, 23 nt, synthetic construct
  source 1..23: mol_type = other RNA
tgtcttcaataatcattccttta

SEQ ID NO: 14553 - RNA, 23 nt, synthetic construct
  source 1..23: mol_type = other RNA
aaattcacaaacacatcattaca

SEQ ID NO: 14554 - RNA, 23 nt, synthetic construct
  source 1..23: mol_type = other RNA
aattcacaaacacatcattacaa

SEQ ID NO: 14555 - RNA, 23 nt, synthetic construct
  source 1..23: mol_type = other RNA
ttcacaaacacatcattacaagc

SEQ ID NO: 14556 - RNA, 23 nt, synthetic construct
  source 1..23: mol_type = other RNA
tcacaaacacatcattacaagct

SEQ ID NO: 14557 - RNA, 23 nt, synthetic construct
  source 1..23: mol_type = other RNA
cacaaacacatcattacaagcta

SEQ ID NO: 14558 - RNA, 23 nt, synthetic construct
  source 1..23: mol_type = other RNA
acaaacacatcattacaagctac

SEQ ID NO: 14559 - RNA, 23 nt, synthetic construct
  source 1..23: mol_type = other RNA
caaacacatcattacaagctact

SEQ ID NO: 14560 - RNA, 23 nt, synthetic construct
  source 1..23: mol_type = other RNA
aaacacatcattacaagctactt

SEQ ID NO: 14561 - RNA, 23 nt, synthetic construct
  source 1..23: mol_type = other RNA
aacacatcattacaagctactta

SEQ ID NO: 14562 - RNA, 23 nt, synthetic construct
  source 1..23: mol_type = other RNA
acaagctacttagaaatgtttag

SEQ ID NO: 14563 - RNA, 23 nt, synthetic construct
  source 1..23: mol_type = other RNA
catcattacaagctacttagaaa

SEQ ID NO: 14564 - RNA, 23 nt, synthetic construct
  source 1..23: mol_type = other RNA
ttacaagctacttagaaatgttt

SEQ ID NO: 14565 - RNA, 23 nt, synthetic construct
  source 1..23: mol_type = other RNA
agctacttagaaatgtttagtat

SEQ ID NO: 14566 - RNA, 23 nt, synthetic construct
  source 1..23: mol_type = other RNA
gtgaaacatactatttctgtttg

SEQ ID NO: 14567 - RNA, 23 nt, synthetic construct
  source 1..23: mol_type = other RNA
agctgcttctaaataacaaaaaa

SEQ ID NO: 14568 - RNA, 23 nt, synthetic construct
  source 1..23: mol_type = other RNA
gctgcttctaaataacaaaaaag

SEQ ID NO: 14569 - RNA, 23 nt, synthetic construct
  source 1..23: mol_type = other RNA
tatgggcatttttcaaaacattt

SEQ ID NO: 14570 - RNA, 23 nt, synthetic construct
  source 1..23: mol_type = other RNA
ttctttttttcatctagccttgc

SEQ ID NO: 14571 - RNA, 23 nt, synthetic construct
  source 1..23: mol_type = other RNA
tgactttctttttttcatctagc

SEQ ID NO: 14572 - RNA, 23 nt, synthetic construct
  source 1..23: mol_type = other RNA
gactttctttttttcatctagcc

SEQ ID NO: 14573 - RNA, 23 nt, synthetic construct
  source 1..23: mol_type = other RNA
actttctttttttcatctagcct

SEQ ID NO: 14574 - RNA, 23 nt, synthetic construct
  source 1..23: mol_type = other RNA
ctttctttttttcatctagcctt

SEQ ID NO: 14575 - RNA, 23 nt, synthetic construct
  source 1..23: mol_type = other RNA
tttctttttttcatctagccttg

SEQ ID NO: 14576 - RNA, 23 nt, synthetic construct
  source 1..23: mol_type = other RNA
tctttttttcatctagccttgct

SEQ ID NO: 14577 - RNA, 23 nt, synthetic construct
  source 1..23: mol_type = other RNA
ctttttttcatctagccttgctt

SEQ ID NO: 14578 - RNA, 23 nt, synthetic construct
  source 1..23: mol_type = other RNA
tttttttcatctagccttgcttt

SEQ ID NO: 14579 - RNA, 23 nt, synthetic construct
  source 1..23: mol_type = other RNA
ttttttcatctagccttgcttta

SEQ ID NO: 14580 - RNA, 23 nt, synthetic construct
  source 1..23: mol_type = other RNA
ttttcatctagccttgctttata

SEQ ID NO: 14581 - RNA, 23 nt, synthetic construct
  source 1..23: mol_type = other RNA
tcccttagtactctcagagatta

SEQ ID NO: 14582 - RNA, 23 nt, synthetic construct
  source 1..23: mol_type = other RNA
agtactctcagagattatataaa

SEQ ID NO: 14583 - RNA, 23 nt, synthetic construct
  source 1..23: mol_type = other RNA
gtactctcagagattatataaag

SEQ ID NO: 14584 - RNA, 23 nt, synthetic construct
  source 1..23: mol_type = other RNA
ctagttactagcagaactcttat

SEQ ID NO: 14585 - RNA, 23 nt, synthetic construct
  source 1..23: mol_type = other RNA
cccagcactgttccctgccatat

SEQ ID NO: 14586 - RNA, 23 nt, synthetic construct
  source 1..23: mol_type = other RNA
ccagcactgttccctgccatatc

SEQ ID NO: 14587 - RNA, 23 nt, synthetic construct
  source 1..23: mol_type = other RNA
cagcactgttccctgccatatcc

SEQ ID NO: 14588 - RNA, 23 nt, synthetic construct
  source 1..23: mol_type = other RNA
agcactgttccctgccatatccc

SEQ ID NO: 14589 - RNA, 23 nt, synthetic construct
  source 1..23: mol_type = other RNA
cccaacttttactgattaaaaat

SEQ ID NO: 14590 - RNA, 23 nt, synthetic construct
  source 1..23: mol_type = other RNA
acgtaatgtgccattcaatgatg

SEQ ID NO: 14591 - RNA, 23 nt, synthetic construct
  source 1..23: mol_type = other RNA
gatgatgataaaatcccactttt

SEQ ID NO: 14592 - RNA, 23 nt, synthetic construct
  source 1..23: mol_type = other RNA
atgatgataaaatcccacttttc

SEQ ID NO: 14593 - RNA, 23 nt, synthetic construct
  source 1..23: mol_type = other RNA
tcccacttttctttgggtttcta

SEQ ID NO: 14594 - RNA, 23 nt, synthetic construct
  source 1..23: mol_type = other RNA
cccacttttctttgggtttctac

SEQ ID NO: 14595 - RNA, 23 nt, synthetic construct
  source 1..23: mol_type = other RNA
ccacttttctttgggtttctact

SEQ ID NO: 14596 - RNA, 23 nt, synthetic construct
  source 1..23: mol_type = other RNA
cacttttctttgggtttctacta

SEQ ID NO: 14597 - RNA, 23 nt, synthetic construct
  source 1..23: mol_type = other RNA
acttttctttgggtttctactaa

SEQ ID NO: 14598 - RNA, 23 nt, synthetic construct
  source 1..23: mol_type = other RNA
cttttctttgggtttctactaaa

SEQ ID NO: 14599 - RNA, 23 nt, synthetic construct
  source 1..23: mol_type = other RNA
ttttctttgggtttctactaaaa

SEQ ID NO: 14600 - RNA, 23 nt, synthetic construct
  source 1..23: mol_type = other RNA
tttctttgggtttctactaaaat

SEQ ID NO: 14601 - RNA, 23 nt, synthetic construct
  source 1..23: mol_type = other RNA
ttctttgggtttctactaaaata

SEQ ID NO: 14602 - RNA, 23 nt, synthetic construct
  source 1..23: mol_type = other RNA
tctttgggtttctactaaaataa

SEQ ID NO: 14603 - RNA, 23 nt, synthetic construct
  source 1..23: mol_type = other RNA
ctttgggtttctactaaaataat

SEQ ID NO: 14604 - RNA, 23 nt, synthetic construct
  source 1..23: mol_type = other RNA
ctaaaataatttactcactcaga

SEQ ID NO: 14605 - RNA, 23 nt, synthetic construct
  source 1..23: mol_type = other RNA
aaaataatttactcactcagagt

SEQ ID NO: 14606 - RNA, 23 nt, synthetic construct
  source 1..23: mol_type = other RNA
aaataatttactcactcagagtg

SEQ ID NO: 14607 - RNA, 23 nt, synthetic construct
  source 1..23: mol_type = other RNA
aataatttactcactcagagtga

SEQ ID NO: 14608 - RNA, 23 nt, synthetic construct
  source 1..23: mol_type = other RNA
ataatttactcactcagagtgag

SEQ ID NO: 14609 - RNA, 23 nt, synthetic construct
  source 1..23: mol_type = other RNA
taatttactcactcagagtgagg

SEQ ID NO: 14610 - RNA, 23 nt, synthetic construct
  source 1..23: mol_type = other RNA
agagtgaggtcaatgagaaaaac

SEQ ID NO: 14611 - RNA, 23 nt, synthetic construct
  source 1..23: mol_type = other RNA
gtgctgataaaattaatggataa

SEQ ID NO: 14612 - RNA, 23 nt, synthetic construct
  source 1..23: mol_type = other RNA
ggctaagaaagagttgtagaatg

SEQ ID NO: 14613 - RNA, 23 nt, synthetic construct
  source 1..23: mol_type = other RNA
aagaaagagttgtagaatggttg

SEQ ID NO: 14614 - RNA, 23 nt, synthetic construct
  source 1..23: mol_type = other RNA
gggtgctgataaaattaatggat

SEQ ID NO: 14615 - RNA, 23 nt, synthetic construct
  source 1..23: mol_type = other RNA
ggtgctgataaaattaatggata

SEQ ID NO: 14616 - RNA, 23 nt, synthetic construct
  source 1..23: mol_type = other RNA
actgtgagagtatagaatttctt

SEQ ID NO: 14617 - RNA, 23 nt, synthetic construct
  source 1..23: mol_type = other RNA
taggaactgtgagagtatagaat

SEQ ID NO: 14618 - RNA, 23 nt, synthetic construct
  source 1..23: mol_type = other RNA
aggaactgtgagagtatagaatt

SEQ ID NO: 14619 - RNA, 23 nt, synthetic construct
  source 1..23: mol_type = other RNA
ggaactgtgagagtatagaattt

SEQ ID NO: 14620 - RNA, 23 nt, synthetic construct
  source 1..23: mol_type = other RNA
gaactgtgagagtatagaatttc

SEQ ID NO: 14621 - RNA, 23 nt, synthetic construct
  source 1..23: mol_type = other RNA
aactgtgagagtatagaatttct

SEQ ID NO: 14622 - RNA, 23 nt, synthetic construct
  source 1..23: mol_type = other RNA
ctgtgagagtatagaatttctta

SEQ ID NO: 14623 - RNA, 23 nt, synthetic construct
  source 1..23: mol_type = other RNA
tgtgagagtatagaatttcttag

SEQ ID NO: 14624 - RNA, 23 nt, synthetic construct
  source 1..23: mol_type = other RNA
gtgagagtatagaatttcttagt

SEQ ID NO: 14625 - RNA, 23 nt, synthetic construct
  source 1..23: mol_type = other RNA
tgagagtatagaatttcttagtg

SEQ ID NO: 14626 - RNA, 23 nt, synthetic construct
  source 1..23: mol_type = other RNA
gagagtatagaatttcttagtgc

SEQ ID NO: 14627 - RNA, 23 nt, synthetic construct
  source 1..23: mol_type = other RNA
agagtatagaatttcttagtgca

SEQ ID NO: 14628 - RNA, 23 nt, synthetic construct
  source 1..23: mol_type = other RNA
gagtatagaatttcttagtgcaa

SEQ ID NO: 14629 - RNA, 23 nt, synthetic construct
  source 1..23: mol_type = other RNA
tctgtaaggactgttctttctct

SEQ ID NO: 14630 - RNA, 23 nt, synthetic construct
  source 1..23: mol_type = other RNA
agtgggatattatctaacttttc

SEQ ID NO: 14631 - RNA, 23 nt, synthetic construct
  source 1..23: mol_type = other RNA
tttgtctttggcattcatcttct

SEQ ID NO: 14632 - RNA, 23 nt, synthetic construct
  source 1..23: mol_type = other RNA
tctttggcattcatcttctttta

SEQ ID NO: 14633 - RNA, 23 nt, synthetic construct
  source 1..23: mol_type = other RNA
gtgcattaaaaaatgtttggcag

SEQ ID NO: 14634 - RNA, 23 nt, synthetic construct
  source 1..23: mol_type = other RNA
agtcactctataattcctgtatt

SEQ ID NO: 14635 - RNA, 23 nt, synthetic construct
  source 1..23: mol_type = other RNA
tttagttgtcgtttaacctgtcc

SEQ ID NO: 14636 - RNA, 23 nt, synthetic construct
  source 1..23: mol_type = other RNA
ttagttgtcgtttaacctgtcca

SEQ ID NO: 14637 - RNA, 23 nt, synthetic construct
  source 1..23: mol_type = other RNA
tagttgtcgtttaacctgtccaa

SEQ ID NO: 14638 - RNA, 23 nt, synthetic construct
  source 1..23: mol_type = other RNA
tcgtttaacctgtccaaacttct

SEQ ID NO: 14639 - RNA, 23 nt, synthetic construct
  source 1..23: mol_type = other RNA
ttctacacaatgaacttcttaac

SEQ ID NO: 14640 - RNA, 23 nt, synthetic construct
  source 1..23: mol_type = other RNA
agttgtcgtttaacctgtccaaa

SEQ ID NO: 14641 - RNA, 23 nt, synthetic construct
  source 1..23: mol_type = other RNA
gttgtcgtttaacctgtccaaac

SEQ ID NO: 14642 - RNA, 23 nt, synthetic construct
  source 1..23: mol_type = other RNA
ttgtcgtttaacctgtccaaact

SEQ ID NO: 14643 - RNA, 23 nt, synthetic construct
  source 1..23: mol_type = other RNA
tgtcgtttaacctgtccaaactt

SEQ ID NO: 14644 - RNA, 23 nt, synthetic construct
  source 1..23: mol_type = other RNA
gtcgtttaacctgtccaaacttc

SEQ ID NO: 14645 - RNA, 23 nt, synthetic construct
  source 1..23: mol_type = other RNA
cgtttaacctgtccaaacttcta

SEQ ID NO: 14646 - RNA, 23 nt, synthetic construct
  source 1..23: mol_type = other RNA
gtttaacctgtccaaacttctac

SEQ ID NO: 14647 - RNA, 23 nt, synthetic construct
  source 1..23: mol_type = other RNA
tttaacctgtccaaacttctaca

SEQ ID NO: 14648 - RNA, 23 nt, synthetic construct
  source 1..23: mol_type = other RNA
ttaacctgtccaaacttctacac

SEQ ID NO: 14649 - RNA, 23 nt, synthetic construct
  source 1..23: mol_type = other RNA
taacctgtccaaacttctacaca

SEQ ID NO: 14650 - RNA, 23 nt, synthetic construct
  source 1..23: mol_type = other RNA
aacctgtccaaacttctacacaa

SEQ ID NO: 14651 - RNA, 23 nt, synthetic construct
  source 1..23: mol_type = other RNA
acctgtccaaacttctacacaat

SEQ ID NO: 14652 - RNA, 23 nt, synthetic construct
  source 1..23: mol_type = other RNA
cctgtccaaacttctacacaatg

SEQ ID NO: 14653 - RNA, 23 nt, synthetic construct
  source 1..23: mol_type = other RNA
ctgtccaaacttctacacaatga

SEQ ID NO: 14654 - RNA, 23 nt, synthetic construct
  source 1..23: mol_type = other RNA
tgtccaaacttctacacaatgaa

SEQ ID NO: 14655 - RNA, 23 nt, synthetic construct
  source 1..23: mol_type = other RNA
gtccaaacttctacacaatgaac

SEQ ID NO: 14656 - RNA, 23 nt, synthetic construct
  source 1..23: mol_type = other RNA
tccaaacttctacacaatgaact

SEQ ID NO: 14657 - RNA, 23 nt, synthetic construct
  source 1..23: mol_type = other RNA
ccaaacttctacacaatgaactt

SEQ ID NO: 14658 - RNA, 23 nt, synthetic construct
  source 1..23: mol_type = other RNA
caaacttctacacaatgaacttc

SEQ ID NO: 14659 - RNA, 23 nt, synthetic construct
  source 1..23: mol_type = other RNA
aaacttctacacaatgaacttct

SEQ ID NO: 14660 - RNA, 23 nt, synthetic construct
  source 1..23: mol_type = other RNA
aacttctacacaatgaacttctt

SEQ ID NO: 14661 - RNA, 23 nt, synthetic construct
  source 1..23: mol_type = other RNA
acttctacacaatgaacttctta

SEQ ID NO: 14662 - RNA, 23 nt, synthetic construct
  source 1..23: mol_type = other RNA
cttctacacaatgaacttcttaa

SEQ ID NO: 14663 - RNA, 23 nt, synthetic construct
  source 1..23: mol_type = other RNA
tctacacaatgaacttcttaaca

SEQ ID NO: 14664 - RNA, 23 nt, synthetic construct
  source 1..23: mol_type = other RNA
ctacacaatgaacttcttaacaa

SEQ ID NO: 14665 - RNA, 23 nt, synthetic construct
  source 1..23: mol_type = other RNA
tacacaatgaacttcttaacaag

SEQ ID NO: 14666 - RNA, 23 nt, synthetic construct
  source 1..23: mol_type = other RNA
acacaatgaacttcttaacaaga

SEQ ID NO: 14667 - RNA, 23 nt, synthetic construct
  source 1..23: mol_type = other RNA
cacaatgaacttcttaacaagat

SEQ ID NO: 14668 - RNA, 23 nt, synthetic construct
  source 1..23: mol_type = other RNA
acaatgaacttcttaacaagatt

SEQ ID NO: 14669 - RNA, 23 nt, synthetic construct
  source 1..23: mol_type = other RNA
caatgaacttcttaacaagattt

SEQ ID NO: 14670 - RNA, 23 nt, synthetic construct
  source 1..23: mol_type = other RNA
cttaacaagattttaagttctct

SEQ ID NO: 14671 - RNA, 23 nt, synthetic construct
  source 1..23: mol_type = other RNA
taacaagattttaagttctctgt

SEQ ID NO: 14672 - RNA, 23 nt, synthetic construct
  source 1..23: mol_type = other RNA
taagttctctgtataagaggttt

SEQ ID NO: 14673 - RNA, 23 nt, synthetic construct
  source 1..23: mol_type = other RNA
ctgtataagaggtttcacctcat

SEQ ID NO: 14674 - RNA, 23 nt, synthetic construct
  source 1..23: mol_type = other RNA
tcatttggcactatagagtattt

SEQ ID NO: 14675 - RNA, 23 nt, synthetic construct
  source 1..23: mol_type = other RNA
catttggcactatagagtatttg

SEQ ID NO: 14676 - RNA, 23 nt, synthetic construct
  source 1..23: mol_type = other RNA
ggcagagatgatttttcttttaa

SEQ ID NO: 14677 - RNA, 23 nt, synthetic construct
  source 1..23: mol_type = other RNA
atttggcactatagagtatttgt

SEQ ID NO: 14678 - RNA, 23 nt, synthetic construct
  source 1..23: mol_type = other RNA
tttggcactatagagtatttgtt

SEQ ID NO: 14679 - RNA, 23 nt, synthetic construct
  source 1..23: mol_type = other RNA
ttggcactatagagtatttgtta

SEQ ID NO: 14680 - RNA, 23 nt, synthetic construct
  source 1..23: mol_type = other RNA
tggcactatagagtatttgttaa

SEQ ID NO: 14681 - RNA, 23 nt, synthetic construct
  source 1..23: mol_type = other RNA
ggcactatagagtatttgttaat

SEQ ID NO: 14682 - RNA, 23 nt, synthetic construct
  source 1..23: mol_type = other RNA
gcactatagagtatttgttaatg

SEQ ID NO: 14683 - RNA, 23 nt, synthetic construct
  source 1..23: mol_type = other RNA
cactatagagtatttgttaatgg

SEQ ID NO: 14684 - RNA, 23 nt, synthetic construct
  source 1..23: mol_type = other RNA
actatagagtatttgttaatggc

SEQ ID NO: 14685 - RNA, 23 nt, synthetic construct
  source 1..23: mol_type = other RNA
ctatagagtatttgttaatggca

SEQ ID NO: 14686 - RNA, 23 nt, synthetic construct
  source 1..23: mol_type = other RNA
tatagagtatttgttaatggcag

SEQ ID NO: 14687 - RNA, 23 nt, synthetic construct
  source 1..23: mol_type = other RNA
atagagtatttgttaatggcaga

SEQ ID NO: 14688 - RNA, 23 nt, synthetic construct
  source 1..23: mol_type = other RNA
tagagtatttgttaatggcagag

SEQ ID NO: 14689 - RNA, 23 nt, synthetic construct
  source 1..23: mol_type = other RNA
tggcagagatgatttttctttta

SEQ ID NO: 14690 - RNA, 23 nt, synthetic construct
  source 1..23: mol_type = other RNA
gcagagatgatttttcttttaaa

SEQ ID NO: 14691 - RNA, 23 nt, synthetic construct
  source 1..23: mol_type = other RNA
aaagactagctgttatttgtatt

SEQ ID NO: 14692 - RNA, 23 nt, synthetic construct
  source 1..23: mol_type = other RNA
tagctaacatataaagaatgtct

SEQ ID NO: 14693 - RNA, 23 nt, synthetic construct
  source 1..23: mol_type = other RNA
taaagaatgtctacttttgcttt

SEQ ID NO: 14694 - RNA, 23 nt, synthetic construct
  source 1..23: mol_type = other RNA
agaatgtctacttttgctttaat

SEQ ID NO: 14695 - RNA, 23 nt, synthetic construct
  source 1..23: mol_type = other RNA
aactaagccattatgctattagt

SEQ ID NO: 14696 - RNA, 23 nt, synthetic construct
  source 1..23: mol_type = other RNA
acaatccctattttaaaattccc

SEQ ID NO: 14697 - RNA, 23 nt, synthetic construct
  source 1..23: mol_type = other RNA
cctaacaataatagaactgccag

SEQ ID NO: 14698 - RNA, 23 nt, synthetic construct
  source 1..23: mol_type = other RNA
atacttttctctttcagttgtag

SEQ ID NO: 14699 - RNA, 23 nt, synthetic construct
  source 1..23: mol_type = other RNA
aattaggtaacaatccctatttt

SEQ ID NO: 14700 - RNA, 23 nt, synthetic construct
  source 1..23: mol_type = other RNA
attaggtaacaatccctatttta

SEQ ID NO: 14701 - RNA, 23 nt, synthetic construct
  source 1..23: mol_type = other RNA
ttaggtaacaatccctattttaa

SEQ ID NO: 14702 - RNA, 23 nt, synthetic construct
  source 1..23: mol_type = other RNA
taggtaacaatccctattttaaa

SEQ ID NO: 14703 - RNA, 23 nt, synthetic construct
  source 1..23: mol_type = other RNA
aggtaacaatccctattttaaaa

SEQ ID NO: 14704 - RNA, 23 nt, synthetic construct
  source 1..23: mol_type = other RNA
ggtaacaatccctattttaaaat

SEQ ID NO: 14705 - RNA, 23 nt, synthetic construct
  source 1..23: mol_type = other RNA
ccctaacaataatagaactgcca

SEQ ID NO: 14706 - RNA, 23 nt, synthetic construct
  source 1..23: mol_type = other RNA
ctaacaataatagaactgccagc

SEQ ID NO: 14707 - RNA, 23 nt, synthetic construct
  source 1..23: mol_type = other RNA
taacaataatagaactgccagca

SEQ ID NO: 14708 - RNA, 23 nt, synthetic construct
  source 1..23: mol_type = other RNA
agaactgccagcatacttttctc

SEQ ID NO: 14709 - RNA, 23 nt, synthetic construct
  source 1..23: mol_type = other RNA
gaactgccagcatacttttctct

SEQ ID NO: 14710 - RNA, 23 nt, synthetic construct
  source 1..23: mol_type = other RNA
aactgccagcatacttttctctt

SEQ ID NO: 14711 - RNA, 23 nt, synthetic construct
  source 1..23: mol_type = other RNA
actgccagcatacttttctcttt

SEQ ID NO: 14712 - RNA, 23 nt, synthetic construct
  source 1..23: mol_type = other RNA
ctgccagcatacttttctctttc

SEQ ID NO: 14713 - RNA, 23 nt, synthetic construct
  source 1..23: mol_type = other RNA
tgccagcatacttttctctttca

SEQ ID NO: 14714 - RNA, 23 nt, synthetic construct
  source 1..23: mol_type = other RNA
gccagcatacttttctctttcag

SEQ ID NO: 14715 - RNA, 23 nt, synthetic construct
  source 1..23: mol_type = other RNA
ccagcatacttttctctttcagt

SEQ ID NO: 14716 - RNA, 23 nt, synthetic construct
  source 1..23: mol_type = other RNA
cagcatacttttctctttcagtt

SEQ ID NO: 14717 - RNA, 23 nt, synthetic construct
  source 1..23: mol_type = other RNA
agcatacttttctctttcagttg

SEQ ID NO: 14718 - RNA, 23 nt, synthetic construct
  source 1..23: mol_type = other RNA
gcatacttttctctttcagttgt

SEQ ID NO: 14719 - RNA, 23 nt, synthetic construct
  source 1..23: mol_type = other RNA
catacttttctctttcagttgta

SEQ ID NO: 14720 - RNA, 23 nt, synthetic construct
  source 1..23: mol_type = other RNA
tttcagttgtagatgaatacatt

SEQ ID NO: 14721 - RNA, 23 nt, synthetic construct
  source 1..23: mol_type = other RNA
ttcagttgtagatgaatacattc

SEQ ID NO: 14722 - RNA, 23 nt, synthetic construct
  source 1..23: mol_type = other RNA
tgtgactgtatttcctgatcatt

SEQ ID NO: 14723 - RNA, 23 nt, synthetic construct
  source 1..23: mol_type = other RNA
tattttcagatgtgactgtattt

SEQ ID NO: 14724 - RNA, 23 nt, synthetic construct
  source 1..23: mol_type = other RNA
attttcagatgtgactgtatttc

SEQ ID NO: 14725 - RNA, 23 nt, synthetic construct
  source 1..23: mol_type = other RNA
ttttcagatgtgactgtatttcc

SEQ ID NO: 14726 - RNA, 23 nt, synthetic construct
  source 1..23: mol_type = other RNA
tttcagatgtgactgtatttcct

SEQ ID NO: 14727 - RNA, 23 nt, synthetic construct
  source 1..23: mol_type = other RNA
ttcagatgtgactgtatttcctg

SEQ ID NO: 14728 - RNA, 23 nt, synthetic construct
  source 1..23: mol_type = other RNA
tcagatgtgactgtatttcctga

SEQ ID NO: 14729 - RNA, 23 nt, synthetic construct
  source 1..23: mol_type = other RNA
cagatgtgactgtatttcctgat

SEQ ID NO: 14730 - RNA, 23 nt, synthetic construct
  source 1..23: mol_type = other RNA
agatgtgactgtatttcctgatc

SEQ ID NO: 14731 - RNA, 23 nt, synthetic construct
  source 1..23: mol_type = other RNA
gatgtgactgtatttcctgatca

SEQ ID NO: 14732 - RNA, 23 nt, synthetic construct
  source 1..23: mol_type = other RNA
atgtgactgtatttcctgatcat

SEQ ID NO: 14733 - RNA, 23 nt, synthetic construct
  source 1..23: mol_type = other RNA
gtgactgtatttcctgatcattg

SEQ ID NO: 14734 - RNA, 23 nt, synthetic construct
  source 1..23: mol_type = other RNA
tgactgtatttcctgatcattgg

SEQ ID NO: 14735 - RNA, 23 nt, synthetic construct
  source 1..23: mol_type = other RNA
gactgtatttcctgatcattggt

SEQ ID NO: 14736 - RNA, 23 nt, synthetic construct
  source 1..23: mol_type = other RNA
actgtatttcctgatcattggtc

SEQ ID NO: 14737 - RNA, 23 nt, synthetic construct
  source 1..23: mol_type = other RNA
ctgtatttcctgatcattggtcc

SEQ ID NO: 14738 - RNA, 23 nt, synthetic construct
  source 1..23: mol_type = other RNA
taggagattacccttatacccac

SEQ ID NO: 14739 - RNA, 23 nt, synthetic construct
  source 1..23: mol_type = other RNA
gggctaaaatccaactgcaattg

SEQ ID NO: 14740 - RNA, 23 nt, synthetic construct
  source 1..23: mol_type = other RNA
aggtgcgggctaaaatccaactg

SEQ ID NO: 14741 - RNA, 23 nt, synthetic construct
  source 1..23: mol_type = other RNA
ggtgcgggctaaaatccaactgc

SEQ ID NO: 14742 - RNA, 23 nt, synthetic construct
  source 1..23: mol_type = other RNA
gtgcgggctaaaatccaactgca

SEQ ID NO: 14743 - RNA, 23 nt, synthetic construct
  source 1..23: mol_type = other RNA
tgcgggctaaaatccaactgcaa

SEQ ID NO: 14744 - RNA, 23 nt, synthetic construct
  source 1..23: mol_type = other RNA
gcgggctaaaatccaactgcaat

SEQ ID NO: 14745 - RNA, 23 nt, synthetic construct
  source 1..23: mol_type = other RNA
cgggctaaaatccaactgcaatt

SEQ ID NO: 14746 - RNA, 23 nt, synthetic construct
  source 1..23: mol_type = other RNA
ggctaaaatccaactgcaattgg

SEQ ID NO: 14747 - RNA, 23 nt, synthetic construct
  source 1..23: mol_type = other RNA
gctaaaatccaactgcaattggc

SEQ ID NO: 14748 - RNA, 23 nt, synthetic construct
  source 1..23: mol_type = other RNA
ctaaaatccaactgcaattggct

SEQ ID NO: 14749 - RNA, 23 nt, synthetic construct
  source 1..23: mol_type = other RNA
taaaatccaactgcaattggctc

SEQ ID NO: 14750 - RNA, 23 nt, synthetic construct
  source 1..23: mol_type = other RNA
aaaatccaactgcaattggctcc

SEQ ID NO: 14751 - RNA, 23 nt, synthetic construct
  source 1..23: mol_type = other RNA
aaatccaactgcaattggctccc

SEQ ID NO: 14752 - RNA, 23 nt, synthetic construct
  source 1..23: mol_type = other RNA
aatccaactgcaattggctccca

SEQ ID NO: 14753 - RNA, 23 nt, synthetic construct
  source 1..23: mol_type = other RNA
cagagaagcatcttattggctta

SEQ ID NO: 14754 - RNA, 23 nt, synthetic construct
  source 1..23: mol_type = other RNA
agaagcatcttattggcttatat

SEQ ID NO: 14755 - RNA, 23 nt, synthetic construct
  source 1..23: mol_type = other RNA
gaagcatcttattggcttatatg

SEQ ID NO: 14756 - RNA, 23 nt, synthetic construct
  source 1..23: mol_type = other RNA
tatacatcttcagaaaatgagaa

SEQ ID NO: 14757 - RNA, 23 nt, synthetic construct
  source 1..23: mol_type = other RNA
atacatcttcagaaaatgagaat

SEQ ID NO: 14758 - RNA, 23 nt, synthetic construct
  source 1..23: mol_type = other RNA
tacatcttcagaaaatgagaatt

SEQ ID NO: 14759 - RNA, 23 nt, synthetic construct
  source 1..23: mol_type = other RNA
acatcttcagaaaatgagaatta

SEQ ID NO: 14760 - RNA, 23 nt, synthetic construct
  source 1..23: mol_type = other RNA
catcttcagaaaatgagaattaa

SEQ ID NO: 14761 - RNA, 23 nt, synthetic construct
  source 1..23: mol_type = other RNA
ctacagattgaacaaagaactta

SEQ ID NO: 14762 - RNA, 23 nt, synthetic construct
  source 1..23: mol_type = other RNA
tacagattgaacaaagaacttag

SEQ ID NO: 14763 - RNA, 23 nt, synthetic construct
  source 1..23: mol_type = other RNA
acagattgaacaaagaacttaga

SEQ ID NO: 14764 - RNA, 23 nt, synthetic construct
  source 1..23: mol_type = other RNA
cagattgaacaaagaacttagaa

SEQ ID NO: 14765 - RNA, 23 nt, synthetic construct
  source 1..23: mol_type = other RNA
agattgaacaaagaacttagaag

SEQ ID NO: 14766 - RNA, 23 nt, synthetic construct
  source 1..23: mol_type = other RNA
gattgaacaaagaacttagaaga

SEQ ID NO: 14767 - RNA, 23 nt, synthetic construct
  source 1..23: mol_type = other RNA
gagaagagaaattgattgtttat

SEQ ID NO: 14768 - RNA, 23 nt, synthetic construct
  source 1..23: mol_type = other RNA
catgttggtttaatttttcaacc

SEQ ID NO: 14769 - RNA, 23 nt, synthetic construct
  source 1..23: mol_type = other RNA
attcctgagagaagagaaattga

SEQ ID NO: 14770 - RNA, 23 nt, synthetic construct
  source 1..23: mol_type = other RNA
ttcctgagagaagagaaattgat

SEQ ID NO: 14771 - RNA, 23 nt, synthetic construct
  source 1..23: mol_type = other RNA
tcctgagagaagagaaattgatt

SEQ ID NO: 14772 - RNA, 23 nt, synthetic construct
  source 1..23: mol_type = other RNA
cctgagagaagagaaattgattg

SEQ ID NO: 14773 - RNA, 23 nt, synthetic construct
  source 1..23: mol_type = other RNA
ctgagagaagagaaattgattgt

SEQ ID NO: 14774 - RNA, 23 nt, synthetic construct
  source 1..23: mol_type = other RNA
tgagagaagagaaattgattgtt

SEQ ID NO: 14775 - RNA, 23 nt, synthetic construct
  source 1..23: mol_type = other RNA
gagagaagagaaattgattgttt

SEQ ID NO: 14776 - RNA, 23 nt, synthetic construct
  source 1..23: mol_type = other RNA
agagaagagaaattgattgttta

SEQ ID NO: 14777 - RNA, 23 nt, synthetic construct
  source 1..23: mol_type = other RNA
gaagagaaattgattgtttatca

SEQ ID NO: 14778 - RNA, 23 nt, synthetic construct
  source 1..23: mol_type = other RNA
atgttggtttaatttttcaaccc

SEQ ID NO: 14779 - RNA, 23 nt, synthetic construct
  source 1..23: mol_type = other RNA
tgttggtttaatttttcaaccca

SEQ ID NO: 14780 - RNA, 23 nt, synthetic construct
  source 1..23: mol_type = other RNA
gttggtttaatttttcaacccag

SEQ ID NO: 14781 - RNA, 23 nt, synthetic construct
  source 1..23: mol_type = other RNA
tatcgtccatacagttttcattc

SEQ ID NO: 14782 - RNA, 23 nt, synthetic construct
  source 1..23: mol_type = other RNA
atcgtccatacagttttcattct

SEQ ID NO: 14783 - RNA, 23 nt, synthetic construct
  source 1..23: mol_type = other RNA
tcgtccatacagttttcattcta

SEQ ID NO: 14784 - RNA, 23 nt, synthetic construct
  source 1..23: mol_type = other RNA
cgtccatacagttttcattctat

SEQ ID NO: 14785 - RNA, 23 nt, synthetic construct
  source 1..23: mol_type = other RNA
gtccatacagttttcattctatg

SEQ ID NO: 14786 - RNA, 23 nt, synthetic construct
  source 1..23: mol_type = other RNA
tccatacagttttcattctatgc

SEQ ID NO: 14787 - RNA, 23 nt, synthetic construct
  source 1..23: mol_type = other RNA
ccatacagttttcattctatgca

SEQ ID NO: 14788 - RNA, 23 nt, synthetic construct
  source 1..23: mol_type = other RNA
catacagttttcattctatgcat

SEQ ID NO: 14789 - RNA, 23 nt, synthetic construct
  source 1..23: mol_type = other RNA
atacagttttcattctatgcatg

SEQ ID NO: 14790 - RNA, 23 nt, synthetic construct
  source 1..23: mol_type = other RNA
tacagttttcattctatgcatgg

SEQ ID NO: 14791 - RNA, 23 nt, synthetic construct
  source 1..23: mol_type = other RNA
acagttttcattctatgcatgga

SEQ ID NO: 14792 - RNA, 23 nt, synthetic construct
  source 1..23: mol_type = other RNA
gaggattgtgtgcctaaattttg

SEQ ID NO: 14793 - RNA, 23 nt, synthetic construct
  source 1..23: mol_type = other RNA
gcctaaattttgtctaacaaatg

SEQ ID NO: 14794 - RNA, 23 nt, synthetic construct
  source 1..23: mol_type = other RNA
cgtagaatgacatttactaatat

SEQ ID NO: 14795 - RNA, 23 nt, synthetic construct
  source 1..23: mol_type = other RNA
tgtgcctaaattttgtctaacaa

SEQ ID NO: 14796 - RNA, 23 nt, synthetic construct
  source 1..23: mol_type = other RNA
cctaaattttgtctaacaaatgc

SEQ ID NO: 14797 - RNA, 23 nt, synthetic construct
  source 1..23: mol_type = other RNA
ctaaattttgtctaacaaatgca

SEQ ID NO: 14798 - RNA, 23 nt, synthetic construct
  source 1..23: mol_type = other RNA
aattttgtctaacaaatgcaagc

SEQ ID NO: 14799 - RNA, 23 nt, synthetic construct
  source 1..23: mol_type = other RNA
ttcttccataggctaaataatag

SEQ ID NO: 14800 - RNA, 23 nt, synthetic construct
  source 1..23: mol_type = other RNA
gagccaaaatattaaattctagt

SEQ ID NO: 14801 - RNA, 23 nt, synthetic construct
  source 1..23: mol_type = other RNA
attaaattctagttcttttccgc

SEQ ID NO: 14802 - RNA, 23 nt, synthetic construct
  source 1..23: mol_type = other RNA
ttaaattctagttcttttccgca

SEQ ID NO: 14803 - RNA, 23 nt, synthetic construct
  source 1..23: mol_type = other RNA
taaattctagttcttttccgcaa

SEQ ID NO: 14804 - RNA, 23 nt, synthetic construct
  source 1..23: mol_type = other RNA
ttctagttcttttccgcaatgac

SEQ ID NO: 14805 - RNA, 23 nt, synthetic construct
  source 1..23: mol_type = other RNA
aaattctagttcttttccgcaat

SEQ ID NO: 14806 - RNA, 23 nt, synthetic construct
  source 1..23: mol_type = other RNA
aattctagttcttttccgcaatg

SEQ ID NO: 14807 - RNA, 23 nt, synthetic construct
  source 1..23: mol_type = other RNA
attctagttcttttccgcaatga

SEQ ID NO: 14808 - RNA, 23 nt, synthetic construct
  source 1..23: mol_type = other RNA
tctagttcttttccgcaatgact

SEQ ID NO: 14809 - RNA, 23 nt, synthetic construct
  source 1..23: mol_type = other RNA
ctagttcttttccgcaatgacta

SEQ ID NO: 14810 - RNA, 23 nt, synthetic construct
  source 1..23: mol_type = other RNA
tagttcttttccgcaatgactag

SEQ ID NO: 14811 - RNA, 23 nt, synthetic construct
  source 1..23: mol_type = other RNA
agttcttttccgcaatgactagt

SEQ ID NO: 14812 - RNA, 23 nt, synthetic construct
  source 1..23: mol_type = other RNA
gttcttttccgcaatgactagtg

SEQ ID NO: 14813 - RNA, 23 nt, synthetic construct
  source 1..23: mol_type = other RNA
gactggagaagattattcaaact

SEQ ID NO: 14814 - RNA, 23 nt, synthetic construct
  source 1..23: mol_type = other RNA
ctggagaagattattcaaacttg

SEQ ID NO: 14815 - RNA, 23 nt, synthetic construct
  source 1..23: mol_type = other RNA
aacttgatctgtgtttcaggttt

SEQ ID NO: 14816 - RNA, 23 nt, synthetic construct
  source 1..23: mol_type = other RNA
gatctgtgtttcaggtttttaaa

SEQ ID NO: 14817 - RNA, 23 nt, synthetic construct
  source 1..23: mol_type = other RNA
ttcaggtttttaaatgtcctaaa

SEQ ID NO: 14818 - RNA, 23 nt, synthetic construct
  source 1..23: mol_type = other RNA
ttgactttcaaagtactaatact

SEQ ID NO: 14819 - RNA, 23 nt, synthetic construct
  source 1..23: mol_type = other RNA
aaaaggaattttggattgacttt

SEQ ID NO: 14820 - RNA, 23 nt, synthetic construct
  source 1..23: mol_type = other RNA
gattgactttcaaagtactaata

SEQ ID NO: 14821 - RNA, 23 nt, synthetic construct
  source 1..23: mol_type = other RNA
ggtagcgtgactcttcttatacc

SEQ ID NO: 14822 - RNA, 23 nt, synthetic construct
  source 1..23: mol_type = other RNA
gcgtgactcttcttatacctaag

SEQ ID NO: 14823 - RNA, 23 nt, synthetic construct
  source 1..23: mol_type = other RNA
cctaagaacatattacaaatgtc

SEQ ID NO: 14824 - RNA, 23 nt, synthetic construct
  source 1..23: mol_type = other RNA
tgcaaaacatgccttgaactctt

SEQ ID NO: 14825 - RNA, 23 nt, synthetic construct
  source 1..23: mol_type = other RNA
gcaaaacatgccttgaactcttg

SEQ ID NO: 14826 - RNA, 23 nt, synthetic construct
  source 1..23: mol_type = other RNA
catgccttgaactcttgaactac

SEQ ID NO: 14827 - RNA, 23 nt, synthetic construct
  source 1..23: mol_type = other RNA
aactcttgaactactgtgaaaag

SEQ ID NO: 14828 - RNA, 23 nt, synthetic construct
  source 1..23: mol_type = other RNA
tcttgaactactgtgaaaagaat

SEQ ID NO: 14829 - RNA, 23 nt, synthetic construct
  source 1..23: mol_type = other RNA
ttgaactactgtgaaaagaatca

SEQ ID NO: 14830 - RNA, 23 nt, synthetic construct
  source 1..23: mol_type = other RNA
accgttgtaaagactttttgtaa

SEQ ID NO: 14831 - RNA, 23 nt, synthetic construct
  source 1..23: mol_type = other RNA
ccgttgtaaagactttttgtaag

SEQ ID NO: 14832 - RNA, 23 nt, synthetic construct
  source 1..23: mol_type = other RNA
agctagctgatactcttaagtat

SEQ ID NO: 14833 - RNA, 23 nt, synthetic construct
  source 1..23: mol_type = other RNA
gtaagctagctgatactcttaag

SEQ ID NO: 14834 - RNA, 23 nt, synthetic construct
  source 1..23: mol_type = other RNA
ttgggcaataaactgtatcaaaa

SEQ ID NO: 14835 - RNA, 23 nt, synthetic construct
  source 1..23: mol_type = other RNA
ggaattgggcaataaactgtatc

SEQ ID NO: 14836 - RNA, 23 nt, synthetic construct
  source 1..23: mol_type = other RNA
gaattgggcaataaactgtatca

SEQ ID NO: 14837 - RNA, 23 nt, synthetic construct
  source 1..23: mol_type = other RNA
aattgggcaataaactgtatcaa

SEQ ID NO: 14838 - RNA, 23 nt, synthetic construct
  source 1..23: mol_type = other RNA
attgggcaataaactgtatcaaa

SEQ ID NO: 14839 - RNA, 23 nt, synthetic construct
  source 1..23: mol_type = other RNA
tgggcaataaactgtatcaaaaa

SEQ ID NO: 14840 - RNA, 23 nt, synthetic construct
  source 1..23: mol_type = other RNA
gggcaataaactgtatcaaaaat

SEQ ID NO: 14841 - RNA, 23 nt, synthetic construct
  source 1..23: mol_type = other RNA
ggcaataaactgtatcaaaaata

SEQ ID NO: 14842 - RNA, 23 nt, synthetic construct
  source 1..23: mol_type = other RNA
ctgtatcaaaaatatgtagatgg

SEQ ID NO: 14843 - RNA, 23 nt, synthetic construct
  source 1..23: mol_type = other RNA
tgtatcaaaaatatgtagatgga

SEQ ID NO: 14844 - RNA, 23 nt, synthetic construct
  source 1..23: mol_type = other RNA
gtatcaaaaatatgtagatggat

SEQ ID NO: 14845 - RNA, 23 nt, synthetic construct
  source 1..23: mol_type = other RNA
ggaaggtgaagagaatttcaaac

SEQ ID NO: 14846 - RNA, 23 nt, synthetic construct
  source 1..23: mol_type = other RNA
aaggtgaagagaatttcaaactc

SEQ ID NO: 14847 - RNA, 23 nt, synthetic construct
  source 1..23: mol_type = other RNA
aggtgaagagaatttcaaactcc

SEQ ID NO: 14848 - RNA, 23 nt, synthetic construct
  source 1..23: mol_type = other RNA
cagatgtttcattaatttctagt

SEQ ID NO: 14849 - RNA, 23 nt, synthetic construct
  source 1..23: mol_type = other RNA
atttctagtctgtgaaaatatgc

SEQ ID NO: 14850 - RNA, 23 nt, synthetic construct
  source 1..23: mol_type = other RNA
tttctagtctgtgaaaatatgca

SEQ ID NO: 14851 - RNA, 23 nt, synthetic construct
  source 1..23: mol_type = other RNA
ttctagtctgtgaaaatatgcat

SEQ ID NO: 14852 - RNA, 23 nt, synthetic construct
  source 1..23: mol_type = other RNA
tctagtctgtgaaaatatgcatt

SEQ ID NO: 14853 - RNA, 23 nt, synthetic construct
  source 1..23: mol_type = other RNA
ctagtctgtgaaaatatgcattt

SEQ ID NO: 14854 - RNA, 23 nt, synthetic construct
  source 1..23: mol_type = other RNA
tagtctgtgaaaatatgcatttt

SEQ ID NO: 14855 - RNA, 23 nt, synthetic construct
  source 1..23: mol_type = other RNA
agtctgtgaaaatatgcatttta

SEQ ID NO: 14856 - RNA, 23 nt, synthetic construct
  source 1..23: mol_type = other RNA
gtctgtgaaaatatgcattttat

SEQ ID NO: 14857 - RNA, 23 nt, synthetic construct
  source 1..23: mol_type = other RNA
gtgatagcctttataccaaaatg

SEQ ID NO: 14858 - RNA, 23 nt, synthetic construct
  source 1..23: mol_type = other RNA
accaacagcaagtcataaaagta

SEQ ID NO: 14859 - RNA, 23 nt, synthetic construct
  source 1..23: mol_type = other RNA
ccaacagcaagtcataaaagtat

SEQ ID NO: 14860 - RNA, 23 nt, synthetic construct
  source 1..23: mol_type = other RNA
caacagcaagtcataaaagtatt

SEQ ID NO: 14861 - RNA, 23 nt, synthetic construct
  source 1..23: mol_type = other RNA
aacagcaagtcataaaagtattt

SEQ ID NO: 14862 - RNA, 23 nt, synthetic construct
  source 1..23: mol_type = other RNA
acagcaagtcataaaagtattta

SEQ ID NO: 14863 - RNA, 23 nt, synthetic construct
  source 1..23: mol_type = other RNA
cagcaagtcataaaagtatttat

SEQ ID NO: 14864 - RNA, 23 nt, synthetic construct
  source 1..23: mol_type = other RNA
ctgtcttcagatgtaaataatta

SEQ ID NO: 14865 - RNA, 23 nt, synthetic construct
  source 1..23: mol_type = other RNA
tgcattttctgaaaatgtattgt

SEQ ID NO: 14866 - RNA, 23 nt, synthetic construct
  source 1..23: mol_type = other RNA
gtgaagcatatagaactctattt

SEQ ID NO: 14867 - RNA, 23 nt, synthetic construct
  source 1..23: mol_type = other RNA
ttctgtgaagcatatagaactct

SEQ ID NO: 14868 - RNA, 23 nt, synthetic construct
  source 1..23: mol_type = other RNA
tctgtgaagcatatagaactcta

SEQ ID NO: 14869 - RNA, 23 nt, synthetic construct
  source 1..23: mol_type = other RNA
ctgtgaagcatatagaactctat

SEQ ID NO: 14870 - RNA, 23 nt, synthetic construct
  source 1..23: mol_type = other RNA
tgtgaagcatatagaactctatt

SEQ ID NO: 14871 - RNA, 23 nt, synthetic construct
  source 1..23: mol_type = other RNA
tgaagcatatagaactctatttt

SEQ ID NO: 14872 - RNA, 23 nt, synthetic construct
  source 1..23: mol_type = other RNA
gaagcatatagaactctatttta

SEQ ID NO: 14873 - RNA, 23 nt, synthetic construct
  source 1..23: mol_type = other RNA
tttaaataaaggaagatgtgtcg

SEQ ID NO: 14874 - RNA, 21 nt, synthetic construct
  source 1..21: mol_type = other RNA
tatacctaagaacatattaca

SEQ ID NO: 14875 - RNA, 21 nt, synthetic construct
  source 1..21: mol_type = other RNA
gtgtgattcttcaaacttcaa

SEQ ID NO: 14876 - RNA, 21 nt, synthetic construct
  source 1..21: mol_type = other RNA
ttgtgtgattcttcaaactta

SEQ ID NO: 14877 - RNA, 21 nt, synthetic construct
  source 1..21: mol_type = other RNA
tgtcttttgtgtgattcttca

SEQ ID NO: 14878 - RNA, 21 nt, synthetic construct
  source 1..21: mol_type = other RNA
tcataccaaaatgtttaacta

SEQ ID NO: 14879 - RNA, 21 nt, synthetic construct
  source 1..21: mol_type = other RNA
gtgtcttttgtgtgattctta

SEQ ID NO: 14880 - RNA, 23 nt, synthetic construct
  source 1..23: mol_type = other RNA
tgtaatatgttcttaggtataag

SEQ ID NO: 14881 - RNA, 23 nt, synthetic construct
  source 1..23: mol_type = other RNA
ttgaagtttgaagaatcacacaa

SEQ ID NO: 14882 - RNA, 23 nt, synthetic construct
  source 1..23: mol_type = other RNA
taagtttgaagaatcacacaaaa

SEQ ID NO: 14883 - RNA, 23 nt, synthetic construct
  source 1..23: mol_type = other RNA
tgaagaatcacacaaaagacaca

SEQ ID NO: 14884 - RNA, 23 nt, synthetic construct
  source 1..23: mol_type = other RNA
tagttaaacattttggtatgaag

SEQ ID NO: 14885 - RNA, 23 nt, synthetic construct
  source 1..23: mol_type = other RNA
taagaatcacacaaaagacacac

SEQ ID NO: 14886 - RNA, 21 nt, synthetic construct
  source 1..21: mol_type = other RNA
  modified_base 1: mod_base = OTHER; note = 2'-O-methyluridine-3'-phosphorothioate
  modified_base 2: mod_base = OTHER; note = 2'-O-methyladenosine-3'-phosphorothioate
  modified_base 3: mod_base = OTHER; note = 2'-O-methyluridine-3'-phosphate
  modified_base 4: mod_base = OTHER; note = 2'-O-methyladenosine-3'-phosphate
  modified_base 5: mod_base = OTHER; note = 2'-O-methylcytidine-3'-phosphate
  modified_base 6: mod_base = OTHER; note = 2'-O-docosanyl-cytidine-3'-phosphate
  modified_base 7: mod_base = OTHER; note = 2'-deoxy-2'-fluorouridine-3'-phosphate
  modified_base 8: mod_base = OTHER; note = 2'-O-methyladenosine-3'-phosphate
  modified_base 9: mod_base = OTHER; note = 2'-deoxy-2'-fluoroadenosine-3'-phosphate
  modified_base 10: mod_base = OTHER; note = 2'-deoxy-2'-fluoroguanosine-3'-phosphate
  modified_base 11: mod_base = OTHER; note = 2'-deoxy-2'-fluoroadenosine-3'-phosphate
  modified_base 12: mod_base = OTHER; note = 2'-O-methyladenosine-3'-phosphate
  modified_base 13: mod_base = OTHER; note = 2'-O-methylcytidine-3'-phosphate
  modified_base 14: mod_base = OTHER; note = 2'-O-methyladenosine-3'-phosphate
  modified_base 15: mod_base = OTHER; note = 2'-O-methyluridine-3'-phosphate
  modified_base 16: mod_base = OTHER; note = 2'-O-methyladenosine-3'-phosphate
  modified_base 17: mod_base = OTHER; note = 2'-O-methyluridine-3'-phosphate
  modified_base 18: mod_base = OTHER; note = 2'-O-methyluridine-3'-phosphate
  modified_base 19: mod_base = OTHER; note = 2'-O-methyladenosine-3'-phosphorothioate
  modified_base 20: mod_base = OTHER; note = 2'-O-methylcytidine-3'-phosphorothioate
  modified_base 21: mod_base = OTHER; note = 2'-O-methyladenosine
tatacctaagaacatattaca

SEQ ID NO: 14887 - RNA, 21 nt, synthetic construct
  source 1..21: mol_type = other RNA
  modified_base 1: mod_base = OTHER; note = 2'-O-methylguanosine-3'-phosphorothioate
  modified_base 2: mod_base = OTHER; note = 2'-O-methyluridine-3'-phosphorothioate
  modified_base 3: mod_base = OTHER; note = 2'-O-methylguanosine-3'-phosphate
  modified_base 4: mod_base = OTHER; note = 2'-O-methyluridine-3'-phosphate
  modified_base 5: mod_base = OTHER; note = 2'-O-methylguanosine-3'-phosphate
  modified_base 6: mod_base = OTHER; note = 2'-O-docosanyl-adenosine-3'-phosphate
  modified_base 7: mod_base = OTHER; note = 2'-deoxy-2'-fluorouridine-3'-phosphate
  modified_base 8: mod_base = OTHER; note = 2'-O-methyluridine-3'-phosphate
  modified_base 9: mod_base = OTHER; note = 2'-deoxy-2'-fluorocytidine-3'-phosphate
  modified_base 10: mod_base = OTHER; note = 2'-deoxy-2'-fluorouridine-3'-phosphate
  modified_base 11: mod_base = OTHER; note = 2'-deoxy-2'-fluorouridine-3'-phosphate
  modified_base 12: mod_base = OTHER; note = 2'-O-methylcytidine-3'-phosphate
  modified_base 13: mod_base = OTHER; note = 2'-O-methyladenosine-3'-phosphate
  modified_base 14: mod_base = OTHER; note = 2'-O-methyladenosine-3'-phosphate
  modified_base 15: mod_base = OTHER; note = 2'-O-methyladenosine-3'-phosphate
  modified_base 16: mod_base = OTHER; note = 2'-O-methylcytidine-3'-phosphate
  modified_base 17: mod_base = OTHER; note = 2'-O-methyluridine-3'-phosphate
  modified_base 18: mod_base = OTHER; note = 2'-O-methyluridine-3'-phosphate
  modified_base 19: mod_base = OTHER; note = 2'-O-methylcytidine-3'-phosphorothioate
  modified_base 20: mod_base = OTHER; note = 2'-O-methyladenosine-3'-phosphorothioate
  modified_base 21: mod_base = OTHER; note = 2'-O-methyladenosine
gtgtgattcttcaaacttcaa

SEQ ID NO: 14888 - RNA, 21 nt, synthetic construct
  source 1..21: mol_type = other RNA
  modified_base 1: mod_base = OTHER; note = 2'-O-methyluridine-3'-phosphorothioate
  modified_base 2: mod_base = OTHER; note = 2'-O-methyluridine-3'-phosphorothioate
  modified_base 3: mod_base = OTHER; note = 2'-O-methylguanosine-3'-phosphate
  modified_base 4: mod_base = OTHER; note = 2'-O-methyluridine-3'-phosphate
  modified_base 5: mod_base = OTHER; note = 2'-O-methylguanosine-3'-phosphate
  modified_base 6: mod_base = OTHER; note = 2'-O-docosanyl-uridine-3'-phosphate
  modified_base 7: mod_base = OTHER; note = 2'-deoxy-2'-fluoroguanosine-3'-phosphate
  modified_base 8: mod_base = OTHER; note = 2'-O-methyladenosine-3'-phosphate
  modified_base 9: mod_base = OTHER; note = 2'-deoxy-2'-fluorouridine-3'-phosphate
  modified_base 10: mod_base = OTHER; note = 2'-deoxy-2'-fluorouridine-3'-phosphate
  modified_base 11: mod_base = OTHER; note = 2'-deoxy-2'-fluorocytidine-3'-phosphate
  modified_base 12: mod_base = OTHER; note = 2'-O-methyluridine-3'-phosphate
  modified_base 13: mod_base = OTHER; note = 2'-O-methyluridine-3'-phosphate
  modified_base 14: mod_base = OTHER; note = 2'-O-methylcytidine-3'-phosphate
  modified_base 15: mod_base = OTHER; note = 2'-O-methyladenosine-3'-phosphate
  modified_base 16: mod_base = OTHER; note = 2'-O-methyladenosine-3'-phosphate
  modified_base 17: mod_base = OTHER; note = 2'-O-methyladenosine-3'-phosphate
  modified_base 18: mod_base = OTHER; note = 2'-O-methylcytidine-3'-phosphate
  modified_base 19: mod_base = OTHER; note = 2'-O-methyluridine-3'-phosphorothioate
  modified_base 20: mod_base = OTHER; note = 2'-O-methyluridine-3'-phosphorothioate
  modified_base 21: mod_base = OTHER; note = 2'-O-methyladenosine
ttgtgtgattcttcaaactta

SEQ ID NO: 14889 - RNA, 21 nt, synthetic construct
  source 1..21: mol_type = other RNA
  modified_base 1: mod_base = OTHER; note = 2'-O-methyluridine-3'-phosphorothioate
  modified_base 2: mod_base = OTHER; note = 2'-O-methylguanosine-3'-phosphorothioate
  modified_base 3: mod_base = OTHER; note = 2'-O-methyluridine-3'-phosphate
  modified_base 4: mod_base = OTHER; note = 2'-O-methylcytidine-3'-phosphate
  modified_base 5: mod_base = OTHER; note = 2'-O-methyluridine-3'-phosphate
  modified_base 6: mod_base = OTHER; note = 2'-O-docosanyl-uridine-3'-phosphate
  modified_base 7: mod_base = OTHER; note = 2'-deoxy-2'-fluorouridine-3'-phosphate
  modified_base 8: mod_base = OTHER; note = 2'-O-methyluridine-3'-phosphate
  modified_base 9: mod_base = OTHER; note = 2'-deoxy-2'-fluoroguanosine-3'-phosphate
  modified_base 10: mod_base = OTHER; note = 2'-deoxy-2'-fluorouridine-3'-phosphate
  modified_base 11: mod_base = OTHER; note = 2'-deoxy-2'-fluoroguanosine-3'-phosphate
  modified_base 12: mod_base = OTHER; note = 2'-O-methyluridine-3'-phosphate
  modified_base 13: mod_base = OTHER; note = 2'-O-methylguanosine-3'-phosphate
  modified_base 14: mod_base = OTHER; note = 2'-O-methyladenosine-3'-phosphate
  modified_base 15: mod_base = OTHER; note = 2'-O-methyluridine-3'-phosphate
  modified_base 16: mod_base = OTHER; note = 2'-O-methyluridine-3'-phosphate
  modified_base 17: mod_base = OTHER; note = 2'-O-methylcytidine-3'-phosphate
  modified_base 18: mod_base = OTHER; note = 2'-O-methyluridine-3'-phosphate
  modified_base 19: mod_base = OTHER; note = 2'-O-methyluridine-3'-phosphorothioate
  modified_base 20: mod_base = OTHER; note = 2'-O-methylcytidine-3'-phosphorothioate
  modified_base 21: mod_base = OTHER; note = 2'-O-methyladenosine
tgtcttttgtgtgattcttca

SEQ ID NO: 14890 - RNA, 21 nt, synthetic construct
  source 1..21: mol_type = other RNA
  modified_base 1: mod_base = OTHER; note = 2'-O-methyluridine-3'-phosphorothioate
  modified_base 2: mod_base = OTHER; note = 2'-O-methylcytidine-3'-phosphorothioate
  modified_base 3: mod_base = OTHER; note = 2'-O-methyladenosine-3'-phosphate
  modified_base 4: mod_base = OTHER; note = 2'-O-methyluridine-3'-phosphate
  modified_base 5: mod_base = OTHER; note = 2'-O-methyladenosine-3'-phosphate
  modified_base 6: mod_base = OTHER; note = 2'-O-docosanyl-cytidine-3'-phosphate
  modified_base 7: mod_base = OTHER; note = 2'-deoxy-2'-fluorocytidine-3'-phosphate
  modified_base 8: mod_base = OTHER; note = 2'-O-methyladenosine-3'-phosphate
  modified_base 9: mod_base = OTHER; note = 2'-deoxy-2'-fluoroadenosine-3'-phosphate
  modified_base 10: mod_base = OTHER; note = 2'-deoxy-2'-fluoroadenosine-3'-phosphate
  modified_base 11: mod_base = OTHER; note = 2'-deoxy-2'-fluoroadenosine-3'-phosphate
  modified_base 12: mod_base = OTHER; note = 2'-O-methyluridine-3'-phosphate
  modified_base 13: mod_base = OTHER; note = 2'-O-methylguanosine-3'-phosphate
  modified_base 14: mod_base = OTHER; note = 2'-O-methyluridine-3'-phosphate
  modified_base 15: mod_base = OTHER; note = 2'-O-methyluridine-3'-phosphate
  modified_base 16: mod_base = OTHER; note = 2'-O-methyluridine-3'-phosphate
  modified_base 17: mod_base = OTHER; note = 2'-O-methyladenosine-3'-phosphate
  modified_base 18: mod_base = OTHER; note = 2'-O-methyladenosine-3'-phosphate
  modified_base 19: mod_base = OTHER; note = 2'-O-methylcytidine-3'-phosphorothioate
  modified_base 20: mod_base = OTHER; note = 2'-O-methyluridine-3'-phosphorothioate
  modified_base 21: mod_base = OTHER; note = 2'-O-methyladenosine
tcataccaaaatgtttaacta

SEQ ID NO: 14891 - RNA, 21 nt, synthetic construct
  source 1..21: mol_type = other RNA
  modified_base 1: mod_base = OTHER; note = 2'-O-methylguanosine-3'-phosphorothioate
  modified_base 2: mod_base = OTHER; note = 2'-O-methyluridine-3'-phosphorothioate
  modified_base 3: mod_base = OTHER; note = 2'-O-methylguanosine-3'-phosphate
  modified_base 4: mod_base = OTHER; note = 2'-O-methyluridine-3'-phosphate
  modified_base 5: mod_base = OTHER; note = 2'-O-methylcytidine-3'-phosphate
  modified_base 6: mod_base = OTHER; note = 2'-O-docosanyl-uridine-3'-phosphate
  modified_base 7: mod_base = OTHER; note = 2'-deoxy-2'-fluorouridine-3'-phosphate
  modified_base 8: mod_base = OTHER; note = 2'-O-methyluridine-3'-phosphate
  modified_base 9: mod_base = OTHER; note = 2'-deoxy-2'-fluorouridine-3'-phosphate
  modified_base 10: mod_base = OTHER; note = 2'-deoxy-2'-fluoroguanosine-3'-phosphate
  modified_base 11: mod_base = OTHER; note = 2'-deoxy-2'-fluorouridine-3'-phosphate
  modified_base 12: mod_base = OTHER; note = 2'-O-methylguanosine-3'-phosphate
  modified_base 13: mod_base = OTHER; note = 2'-O-methyluridine-3'-phosphate
  modified_base 14: mod_base = OTHER; note = 2'-O-methylguanosine-3'-phosphate
  modified_base 15: mod_base = OTHER; note = 2'-O-methyladenosine-3'-phosphate
  modified_base 16: mod_base = OTHER; note = 2'-O-methyluridine-3'-phosphate
  modified_base 17: mod_base = OTHER; note = 2'-O-methyluridine-3'-phosphate
  modified_base 18: mod_base = OTHER; note = 2'-O-methylcytidine-3'-phosphate
  modified_base 19: mod_base = OTHER; note = 2'-O-methyluridine-3'-phosphorothioate
  modified_base 20: mod_base = OTHER; note = 2'-O-methyluridine-3'-phosphorothioate
  modified_base 21: mod_base = OTHER; note = 2'-O-methyladenosine
gtgtcttttgtgtgattctta

SEQ ID NO: 14892 - RNA, 23 nt, synthetic construct
  source 1..23: mol_type = other RNA
  modified_base 1: mod_base = OTHER; note = 2'-O-methyluridine-3'-phosphorothioate 5'-(E)-Vinylphosphonate
  modified_base 2: mod_base = OTHER; note = 2'-deoxy-2'-fluoroguanosine-3'-phosphorothioate
  modified_base 3: mod_base = OTHER; note = 2'-O-methyluridine-3'-phosphate
  modified_base 4: mod_base = OTHER; note = 2'-O-methyladenosine-3'-phosphate
  modified_base 5: mod_base = OTHER; note = 2'-O-methyladenosine-3'-phosphate
  modified_base 6: mod_base = OTHER; note = 2'-deoxy-2'-fluorouridine-3'-phosphate
  modified_base 7: mod_base = OTHER; note = 2'-O-methyladenosine-3'-phosphate
  modified_base 8: mod_base = OTHER; note = 2'-deoxy-2'-fluorouridine-3'-phosphate
  modified_base 9: mod_base = OTHER; note = 2'-deoxy-2'-fluoroguanosine-3'-phosphate
  modified_base 10: mod_base = OTHER; note = 2'-O-methyluridine-3'-phosphate
  modified_base 11: mod_base = OTHER; note = 2'-O-methyluridine-3'-phosphate
  modified_base 12: mod_base = OTHER; note = 2'-O-methylcytidine-3'-phosphate
  modified_base 13: mod_base = OTHER; note = 2'-O-methyluridine-3'-phosphate
  modified_base 14: mod_base = OTHER; note = 2'-deoxy-2'-fluorouridine-3'-phosphate
  modified_base 15: mod_base = OTHER; note = 2'-O-methyladenosine-3'-phosphate
  modified_base 16: mod_base = OTHER; note = 2'-deoxy-2'-fluoroguanosine-3'-phosphate
  modified_base 17: mod_base = OTHER; note = 2'-O-methylguanosine-3'-phosphate
  modified_base 18: mod_base = OTHER; note = 2'-O-methyluridine-3'-phosphate
  modified_base 19: mod_base = OTHER; note = 2'-O-methyladenosine-3'-phosphate
  modified_base 20: mod_base = OTHER; note = 2'-O-methyluridine-3'-phosphate
  modified_base 21: mod_base = OTHER; note = 2'-O-methyladenosine-3'-phosphorothioate
  modified_base 22: mod_base = OTHER; note = 2'-O-methyladenosine-3'-phosphorothioate
  modified_base 23: mod_base = OTHER; note = 2'-O-methylguanosine
tgtaatatgttcttaggtataag

SEQ ID NO: 14893 - RNA, 23 nt, synthetic construct
  source 1..23: mol_type = other RNA
  modified_base 1: mod_base = OTHER; note = 2'-O-methyluridine-3'-phosphorothioate 5'-(E)-Vinylphosphonate
  modified_base 2: mod_base = OTHER; note = 2'-deoxy-2'-fluorouridine-3'-phosphorothioate
  modified_base 3: mod_base = OTHER; note = 2'-O-methylguanosine-3'-phosphate
  modified_base 4: mod_base = OTHER; note = 2'-O-methyladenosine-3'-phosphate
  modified_base 5: mod_base = OTHER; note = 2'-O-methyladenosine-3'-phosphate
  modified_base 6: mod_base = OTHER; note = 2'-deoxy-2'-fluoroguanosine-3'-phosphate
  modified_base 7: mod_base = OTHER; note = 2'-O-methyluridine-3'-phosphate
  modified_base 8: mod_base = OTHER; note = 2'-deoxy-2'-fluorouridine-3'-phosphate
  modified_base 9: mod_base = OTHER; note = 2'-deoxy-2'-fluorouridine-3'-phosphate
  modified_base 10: mod_base = OTHER; note = 2'-O-methylguanosine-3'-phosphate
  modified_base 11: mod_base = OTHER; note = 2'-O-methyladenosine-3'-phosphate
  modified_base 12: mod_base = OTHER; note = 2'-O-methyladenosine-3'-phosphate
  modified_base 13: mod_base = OTHER; note = 2'-O-methylguanosine-3'-phosphate
  modified_base 14: mod_base = OTHER; note = 2'-deoxy-2'-fluoroadenosine-3'-phosphate
  modified_base 15: mod_base = OTHER; note = 2'-O-methyladenosine-3'-phosphate
  modified_base 16: mod_base = OTHER; note = 2'-deoxy-2'-fluorouridine-3'-phosphate
  modified_base 17: mod_base = OTHER; note = 2'-O-methylcytidine-3'-phosphate
  modified_base 18: mod_base = OTHER; note = 2'-O-methyladenosine-3'-phosphate
  modified_base 19: mod_base = OTHER; note = 2'-O-methylcytidine-3'-phosphate
  modified_base 20: mod_base = OTHER; note = 2'-O-methyladenosine-3'-phosphate
  modified_base 21: mod_base = OTHER; note = 2'-O-methylcytidine-3'-phosphorothioate
  modified_base 22: mod_base = OTHER; note = 2'-O-methyladenosine-3'-phosphorothioate
  modified_base 23: mod_base = OTHER; note = 2'-O-methyladenosine
ttgaagtttgaagaatcacacaa

SEQ ID NO: 14894 - RNA, 23 nt, synthetic construct
  source 1..23: mol_type = other RNA
  modified_base 1: mod_base = OTHER; note = 2'-O-methyluridine-3'-phosphorothioate 5'-(E)-Vinylphosphonate
  modified_base 2: mod_base = OTHER; note = 2'-deoxy-2'-fluoroadenosine-3'-phosphorothioate
  modified_base 3: mod_base = OTHER; note = 2'-O-methyladenosine-3'-phosphate
  modified_base 4: mod_base = OTHER; note = 2'-O-methylguanosine-3'-phosphate
  modified_base 5: mod_base = OTHER; note = 2'-O-methyluridine-3'-phosphate
  modified_base 6: mod_base = OTHER; note = 2'-deoxy-2'-fluorouridine-3'-phosphate
  modified_base 7: mod_base = OTHER; note = 2'-O-methyluridine-3'-phosphate
  modified_base 8: mod_base = OTHER; note = 2'-deoxy-2'-fluoroguanosine-3'-phosphate
  modified_base 9: mod_base = OTHER; note = 2'-deoxy-2'-fluoroadenosine-3'-phosphate
  modified_base 10: mod_base = OTHER; note = 2'-O-methyladenosine-3'-phosphate
  modified_base 11: mod_base = OTHER; note = 2'-O-methylguanosine-3'-phosphate
  modified_base 12: mod_base = OTHER; note = 2'-O-methyladenosine-3'-phosphate
  modified_base 13: mod_base = OTHER; note = 2'-O-methyladenosine-3'-phosphate
  modified_base 14: mod_base = OTHER; note = 2'-deoxy-2'-fluorouridine-3'-phosphate
  modified_base 15: mod_base = OTHER; note = 2'-O-methylcytidine-3'-phosphate
  modified_base 16: mod_base = OTHER; note = 2'-deoxy-2'-fluoroadenosine-3'-phosphate
  modified_base 17: mod_base = OTHER; note = 2'-O-methylcytidine-3'-phosphate
  modified_base 18: mod_base = OTHER; note = 2'-O-methyladenosine-3'-phosphate
  modified_base 19: mod_base = OTHER; note = 2'-O-methylcytidine-3'-phosphate
  modified_base 20: mod_base = OTHER; note = 2'-O-methyladenosine-3'-phosphate
  modified_base 21: mod_base = OTHER; note = 2'-O-methyladenosine-3'-phosphorothioate
  modified_base 22: mod_base = OTHER; note = 2'-O-methyladenosine-3'-phosphorothioate
  modified_base 23: mod_base = OTHER; note = 2'-O-methyladenosine
taagtttgaagaatcacacaaaa

SEQ ID NO: 14895 - RNA, 23 nt, synthetic construct
  source 1..23: mol_type = other RNA
  modified_base 1: mod_base = OTHER; note = 2'-O-methyluridine-3'-phosphorothioate 5'-(E)-Vinylphosphonate
  modified_base 2: mod_base = OTHER; note = 2'-deoxy-2'-fluoroguanosine-3'-phosphorothioate
  modified_base 3: mod_base = OTHER; note = 2'-O-methyladenosine-3'-phosphate
  modified_base 4: mod_base = OTHER; note = 2'-O-methyladenosine-3'-phosphate
  modified_base 5: mod_base = OTHER; note = 2'-O-methylguanosine-3'-phosphate
  modified_base 6: mod_base = OTHER; note = 2'-deoxy-2'-fluoroadenosine-3'-phosphate
  modified_base 7: mod_base = OTHER; note = 2'-O-methyladenosine-3'-phosphate
  modified_base 8: mod_base = OTHER; note = 2'-deoxy-2'-fluorouridine-3'-phosphate
  modified_base 9: mod_base = OTHER; note = 2'-deoxy-2'-fluorocytidine-3'-phosphate
  modified_base 10: mod_base = OTHER; note = 2'-O-methyladenosine-3'-phosphate
  modified_base 11: mod_base = OTHER; note = 2'-O-methylcytidine-3'-phosphate
  modified_base 12: mod_base = OTHER; note = 2'-O-methyladenosine-3'-phosphate
  modified_base 13: mod_base = OTHER; note = 2'-O-methylcytidine-3'-phosphate
  modified_base 14: mod_base = OTHER; note = 2'-deoxy-2'-fluoroadenosine-3'-phosphate
  modified_base 15: mod_base = OTHER; note = 2'-O-methyladenosine-3'-phosphate
  modified_base 16: mod_base = OTHER; note = 2'-deoxy-2'-fluoroadenosine-3'-phosphate
  modified_base 17: mod_base = OTHER; note = 2'-O-methyladenosine-3'-phosphate
  modified_base 18: mod_base = OTHER; note = 2'-O-methylguanosine-3'-phosphate
  modified_base 19: mod_base = OTHER; note = 2'-O-methyladenosine-3'-phosphate
  modified_base 20: mod_base = OTHER; note = 2'-O-methylcytidine-3'-phosphate
  modified_base 21: mod_base = OTHER; note = 2'-O-methyladenosine-3'-phosphorothioate
  modified_base 22: mod_base = OTHER; note = 2'-O-methylcytidine-3'-phosphorothioate
  modified_base 23: mod_base = OTHER; note = 2'-O-methyladenosine
tgaagaatcacacaaaagacaca

SEQ ID NO: 14896 - RNA, 23 nt, synthetic construct
  source 1..23: mol_type = other RNA
  modified_base 1: mod_base = OTHER; note = 2'-O-methyluridine-3'-phosphorothioate 5'-(E)-Vinylphosphonate
  modified_base 2: mod_base = OTHER; note = 2'-deoxy-2'-fluoroadenosine-3'-phosphorothioate
  modified_base 3: mod_base = OTHER; note = 2'-O-methylguanosine-3'-phosphate
  modified_base 4: mod_base = OTHER; note = 2'-O-methyluridine-3'-phosphate
  modified_base 5: mod_base = OTHER; note = 2'-O-methyluridine-3'-phosphate
  modified_base 6: mod_base = OTHER; note = 2'-deoxy-2'-fluoroadenosine-3'-phosphate
  modified_base 7: mod_base = OTHER; note = 2'-O-methyladenosine-3'-phosphate
  modified_base 8: mod_base = OTHER; note = 2'-deoxy-2'-fluoroadenosine-3'-phosphate
  modified_base 9: mod_base = OTHER; note = 2'-deoxy-2'-fluorocytidine-3'-phosphate
  modified_base 10: mod_base = OTHER; note = 2'-O-methyladenosine-3'-phosphate
  modified_base 11: mod_base = OTHER; note = 2'-O-methyluridine-3'-phosphate
  modified_base 12: mod_base = OTHER; note = 2'-O-methyluridine-3'-phosphate
  modified_base 13: mod_base = OTHER; note = 2'-O-methyluridine-3'-phosphate
  modified_base 14: mod_base = OTHER; note = 2'-deoxy-2'-fluorouridine-3'-phosphate
  modified_base 15: mod_base = OTHER; note = 2'-O-methylguanosine-3'-phosphate
  modified_base 16: mod_base = OTHER; note = 2'-deoxy-2'-fluoroguanosine-3'-phosphate
  modified_base 17: mod_base = OTHER; note = 2'-O-methyluridine-3'-phosphate
  modified_base 18: mod_base = OTHER; note = 2'-O-methyladenosine-3'-phosphate
  modified_base 19: mod_base = OTHER; note = 2'-O-methyluridine-3'-phosphate
  modified_base 20: mod_base = OTHER; note = 2'-O-methylguanosine-3'-phosphate
  modified_base 21: mod_base = OTHER; note = 2'-O-methyladenosine-3'-phosphorothioate
  modified_base 22: mod_base = OTHER; note = 2'-O-methyladenosine-3'-phosphorothioate
  modified_base 23: mod_base = OTHER; note = 2'-O-methylguanosine
tagttaaacattttggtatgaag

SEQ ID NO: 14897 - RNA, 23 nt, synthetic construct
  source 1..23: mol_type = other RNA
  modified_base 1: mod_base = OTHER; note = 2'-O-methyluridine-3'-phosphorothioate 5'-(E)-Vinylphosphonate
  modified_base 2: mod_base = OTHER; note = 2'-deoxy-2'-fluoroadenosine-3'-phosphorothioate
  modified_base 3: mod_base = OTHER; note = 2'-O-methyladenosine-3'-phosphate
  modified_base 4: mod_base = OTHER; note = 2'-O-methylguanosine-3'-phosphate
  modified_base 5: mod_base = OTHER; note = 2'-O-methyladenosine-3'-phosphate
  modified_base 6: mod_base = OTHER; note = 2'-deoxy-2'-fluoroadenosine-3'-phosphate
  modified_base 7: mod_base = OTHER; note = 2'-O-methyluridine-3'-phosphate
  modified_base 8: mod_base = OTHER; note = 2'-deoxy-2'-fluorocytidine-3'-phosphate
  modified_base 9: mod_base = OTHER; note = 2'-deoxy-2'-fluoroadenosine-3'-phosphate
  modified_base 10: mod_base = OTHER; note = 2'-O-methylcytidine-3'-phosphate
  modified_base 11: mod_base = OTHER; note = 2'-O-methyladenosine-3'-phosphate
  modified_base 12: mod_base = OTHER; note = 2'-O-methylcytidine-3'-phosphate
  modified_base 13: mod_base = OTHER; note = 2'-O-methyladenosine-3'-phosphate
  modified_base 14: mod_base = OTHER; note = 2'-deoxy-2'-fluoroadenosine-3'-phosphate
  modified_base 15: mod_base = OTHER; note = 2'-O-methyladenosine-3'-phosphate
  modified_base 16: mod_base = OTHER; note = 2'-deoxy-2'-fluoroadenosine-3'-phosphate
  modified_base 17: mod_base = OTHER; note = 2'-O-methylguanosine-3'-phosphate
  modified_base 18: mod_base = OTHER; note = 2'-O-methyladenosine-3'-phosphate
  modified_base 19: mod_base = OTHER; note = 2'-O-methylcytidine-3'-phosphate
  modified_base 20: mod_base = OTHER; note = 2'-O-methyladenosine-3'-phosphate
  modified_base 21: mod_base = OTHER; note = 2'-O-methylcytidine-3'-phosphorothioate
  modified_base 22: mod_base = OTHER; note = 2'-O-methyladenosine-3'-phosphorothioate
  modified_base 23: mod_base = OTHER; note = 2'-O-methylcytidine
taagaatcacacaaaagacacac

SEQ ID NO: 14898 - RNA, 23 nt, synthetic construct
  source 1..23: mol_type = other RNA
cttatacctaagaacatattaca

SEQ ID NO: 14899 - RNA, 23 nt, synthetic construct
  source 1..23: mol_type = other RNA
ttgtgtgattcttcaaacttcac

SEQ ID NO: 14900 - RNA, 23 nt, synthetic construct
  source 1..23: mol_type = other RNA
  modified_base 23: mod_base = OTHER; note = cytidine-3'-phosphate
ttttgtgtgattcttcaaacttc

SEQ ID NO: 14901 - RNA, 23 nt, synthetic construct
  source 1..23: mol_type = other RNA
  modified_base 23: mod_base = OTHER; note = adenosine-3'-phosphate
tgtgtcttttgtgtgattcttca

SEQ ID NO: 14902 - RNA, 23 nt, synthetic construct
  source 1..23: mol_type = other RNA
  modified_base 23: mod_base = OTHER; note = uridine-3'-phosphate
cttcataccaaaatgtttaactt

SEQ ID NO: 14903 - RNA, 23 nt, synthetic construct
  source 1..23: mol_type = other RNA
  modified_base 23: mod_base = OTHER; note = cytidine-3'-phosphate
gtgtgtcttttgtgtgattcttc

SEQ ID NO: 14904 - RNA, 21 nt, synthetic construct
  source 1..21: mol_type = other RNA
ttgtgtgattcttcaaactta

SEQ ID NO: 14905 - RNA, 21 nt, synthetic construct
  source 1..21: mol_type = other RNA
gtgtgtatgtcttttgtgtga

SEQ ID NO: 14906 - RNA, 21 nt, synthetic construct
  source 1..21: mol_type = other RNA
catagttccaacaatgttaca

SEQ ID NO: 14907 - RNA, 21 nt, synthetic construct
  source 1..21: mol_type = other RNA
tgtgaatatctttgagtccta

SEQ ID NO: 14908 - RNA, 21 nt, synthetic construct
  source 1..21: mol_type = other RNA
aagcctaatgatgataattaa

SEQ ID NO: 14909 - RNA, 21 nt, synthetic construct
  source 1..21: mol_type = other RNA
aagcctaatgatgataattaa

SEQ ID NO: 14910 - RNA, 21 nt, synthetic construct
  source 1..21: mol_type = other RNA
atatctcaactttgtgtcaaa

SEQ ID NO: 14911 - RNA, 21 nt, synthetic construct
  source 1..21: mol_type = other RNA
atgcttgatgatacaatgaaa

SEQ ID NO: 14912 - RNA, 21 nt, synthetic construct
  source 1..21: mol_type = other RNA
gtgtatgtcttttgtgtgata

SEQ ID NO: 14913 - RNA, 21 nt, synthetic construct
  source 1..21: mol_type = other RNA
ctaatgatgataattatgtta

SEQ ID NO: 14914 - RNA, 21 nt, synthetic construct
  source 1..21: mol_type = other RNA
tgaatgtgaatatctttgaga

SEQ ID NO: 14915 - RNA, 21 nt, synthetic construct
  source 1..21: mol_type = other RNA
gaaatgcttgatgatacaata

SEQ ID NO: 14916 - RNA, 23 nt, synthetic construct
  source 1..23: mol_type = other RNA
taagtttgaagaatcacacaaaa

SEQ ID NO: 14917 - RNA, 23 nt, synthetic construct
  source 1..23: mol_type = other RNA
tcacacaaaagacatacacactt

SEQ ID NO: 14918 - RNA, 23 nt, synthetic construct
  source 1..23: mol_type = other RNA
tgtaacattgttggaactatgac

SEQ ID NO: 14919 - RNA, 23 nt, synthetic construct
  source 1..23: mol_type = other RNA
taggactcaaagatattcacatt

SEQ ID NO: 14920 - RNA, 23 nt, synthetic construct
  source 1..23: mol_type = other RNA
ttaattatcatcattaggctttg

SEQ ID NO: 14921 - RNA, 23 nt, synthetic construct
  source 1..23: mol_type = other RNA
  modified_base 5: mod_base = OTHER; note = 5'-methyluridine-3'-phosphate
ttaattatcatcattaggctttg

SEQ ID NO: 14922 - RNA, 23 nt, synthetic construct
  source 1..23: mol_type = other RNA
tttgacacaaagttgagatatag

SEQ ID NO: 14923 - RNA, 23 nt, synthetic construct
  source 1..23: mol_type = other RNA
  modified_base 7: mod_base = OTHER; note = 5'-methyluridine-3'-phosphate
tttcattgtatcatcaagcattt

SEQ ID NO: 14924 - RNA, 23 nt, synthetic construct
  source 1..23: mol_type = other RNA
tatcacacaaaagacatacacac

SEQ ID NO: 14925 - RNA, 23 nt, synthetic construct
  source 1..23: mol_type = other RNA
taacataattatcatcattaggc

SEQ ID NO: 14926 - RNA, 23 nt, synthetic construct
  source 1..23: mol_type = other RNA
tctcaaagatattcacattcatt

SEQ ID NO: 14927 - RNA, 23 nt, synthetic construct
  source 1..23: mol_type = other RNA
tattgtatcatcaagcatttcag

SEQ ID NO: 14928 - RNA, 21 nt, synthetic construct
  source 1..21: mol_type = other RNA
  modified_base 1: mod_base = OTHER; note = 2'-O-methyluridine-3'-phosphorothioate
  modified_base 2: mod_base = OTHER; note = 2'-O-methyluridine-3'-phosphorothioate
  modified_base 3: mod_base = OTHER; note = 2'-O-methylguanosine-3'-phosphate
  modified_base 4: mod_base = OTHER; note = 2'-O-methyluridine-3'-phosphate
  modified_base 5: mod_base = OTHER; note = 2'-O-methylguanosine-3'-phosphate
  modified_base 6: mod_base = OTHER; note = 2'-O-docosanyl-uridine-3'-phosphate
  modified_base 7: mod_base = OTHER; note = 2'-deoxy-2'-fluoroguanosine-3'-phosphate
  modified_base 8: mod_base = OTHER; note = 2'-O-methyladenosine-3'-phosphate
  modified_base 9: mod_base = OTHER; note = 2'-deoxy-2'-fluorouridine-3'-phosphate
  modified_base 10: mod_base = OTHER; note = 2'-deoxy-2'-fluorouridine-3'-phosphate
  modified_base 11: mod_base = OTHER; note = 2'-deoxy-2'-fluorocytidine-3'-phosphate
  modified_base 12: mod_base = OTHER; note = 2'-O-methyluridine-3'-phosphate
  modified_base 13: mod_base = OTHER; note = 2'-O-methyluridine-3'-phosphate
  modified_base 14: mod_base = OTHER; note = 2'-O-methylcytidine-3'-phosphate
  modified_base 15: mod_base = OTHER; note = 2'-O-methyladenosine-3'-phosphate
  modified_base 16: mod_base = OTHER; note = 2'-O-methyladenosine-3'-phosphate
  modified_base 17: mod_base = OTHER; note = 2'-O-methyladenosine-3'-phosphate
  modified_base 18: mod_base = OTHER; note = 2'-O-methylcytidine-3'-phosphate
  modified_base 19: mod_base = OTHER; note = 2'-O-methyluridine-3'-phosphorothioate
  modified_base 20: mod_base = OTHER; note = 2'-O-methyluridine-3'-phosphorothioate
  modified_base 21: mod_base = OTHER; note = 2'-O-methyladenosine
ttgtgtgattcttcaaactta

SEQ ID NO: 14929 - RNA, 21 nt, synthetic construct
  source 1..21: mol_type = other RNA
  modified_base 1: mod_base = OTHER; note = 2'-O-methylguanosine-3'-phosphorothioate
  modified_base 2: mod_base = OTHER; note = 2'-O-methyluridine-3'-phosphorothioate
  modified_base 3: mod_base = OTHER; note = 2'-O-methylguanosine-3'-phosphate
  modified_base 4: mod_base = OTHER; note = 2'-O-methyluridine-3'-phosphate
  modified_base 5: mod_base = OTHER; note = 2'-O-methylguanosine-3'-phosphate
  modified_base 6: mod_base = OTHER; note = 2'-O-docosanyl-uridine-3'-phosphate
  modified_base 7: mod_base = OTHER; note = 2'-deoxy-2'-fluoroadenosine-3'-phosphate
  modified_base 8: mod_base = OTHER; note = 2'-O-methyluridine-3'-phosphate
  modified_base 9: mod_base = OTHER; note = 2'-deoxy-2'-fluoroguanosine-3'-phosphate
  modified_base 10: mod_base = OTHER; note = 2'-deoxy-2'-fluorouridine-3'-phosphate
  modified_base 11: mod_base = OTHER; note = 2'-deoxy-2'-fluorocytidine-3'-phosphate
  modified_base 12: mod_base = OTHER; note = 2'-O-methyluridine-3'-phosphate
  modified_base 13: mod_base = OTHER; note = 2'-O-methyluridine-3'-phosphate
  modified_base 14: mod_base = OTHER; note = 2'-O-methyluridine-3'-phosphate
  modified_base 15: mod_base = OTHER; note = 2'-O-methyluridine-3'-phosphate
  modified_base 16: mod_base = OTHER; note = 2'-O-methylguanosine-3'-phosphate
  modified_base 17: mod_base = OTHER; note = 2'-O-methyluridine-3'-phosphate
  modified_base 18: mod_base = OTHER; note = 2'-O-methylguanosine-3'-phosphate
  modified_base 19: mod_base = OTHER; note = 2'-O-methyluridine-3'-phosphorothioate
  modified_base 20: mod_base = OTHER; note = 2'-O-methylguanosine-3'-phosphorothioate
  modified_base 21: mod_base = OTHER; note = 2'-O-methyladenosine
gtgtgtatgtcttttgtgtga

SEQ ID NO: 14930 - RNA, 21 nt, synthetic construct
  source 1..21: mol_type = other RNA
  modified_base 1: mod_base = OTHER; note = 2'-O-methylcytidine-3'-phosphorothioate
  modified_base 2: mod_base = OTHER; note = 2'-O-methyladenosine-3'-phosphorothioate
  modified_base 3: mod_base = OTHER; note = 2'-O-methyluridine-3'-phosphate
  modified_base 4: mod_base = OTHER; note = 2'-O-methyladenosine-3'-phosphate
  modified_base 5: mod_base = OTHER; note = 2'-O-methylguanosine-3'-phosphate
  modified_base 6: mod_base = OTHER; note = 2'-O-docosanyl-uridine-3'-phosphate
  modified_base 7: mod_base = OTHER; note = 2'-deoxy-2'-fluorouridine-3'-phosphate
  modified_base 8: mod_base = OTHER; note = 2'-O-methylcytidine-3'-phosphate
  modified_base 9: mod_base = OTHER; note = 2'-deoxy-2'-fluorocytidine-3'-phosphate
  modified_base 10: mod_base = OTHER; note = 2'-deoxy-2'-fluoroadenosine-3'-phosphate
  modified_base 11: mod_base = OTHER; note = 2'-deoxy-2'-fluoroadenosine-3'-phosphate
  modified_base 12: mod_base = OTHER; note = 2'-O-methylcytidine-3'-phosphate
  modified_base 13: mod_base = OTHER; note = 2'-O-methyladenosine-3'-phosphate
  modified_base 14: mod_base = OTHER; note = 2'-O-methyladenosine-3'-phosphate
  modified_base 15: mod_base = OTHER; note = 2'-O-methyluridine-3'-phosphate
  modified_base 16: mod_base = OTHER; note = 2'-O-methylguanosine-3'-phosphate
  modified_base 17: mod_base = OTHER; note = 2'-O-methyluridine-3'-phosphate
  modified_base 18: mod_base = OTHER; note = 2'-O-methyluridine-3'-phosphate
  modified_base 19: mod_base = OTHER; note = 2'-O-methyladenosine-3'-phosphorothioate
  modified_base 20: mod_base = OTHER; note = 2'-O-methylcytidine-3'-phosphorothioate
  modified_base 21: mod_base = OTHER; note = 2'-O-methyladenosine
catagttccaacaatgttaca

SEQ ID NO: 14931 - RNA, 21 nt, synthetic construct
  source 1..21: mol_type = other RNA
  modified_base 1: mod_base = OTHER; note = 2'-O-methyluridine-3'-phosphorothioate
  modified_base 2: mod_base = OTHER; note = 2'-O-methylguanosine-3'-phosphorothioate
  modified_base 3: mod_base = OTHER; note = 2'-O-methyluridine-3'-phosphate
  modified_base 4: mod_base = OTHER; note = 2'-O-methylguanosine-3'-phosphate
  modified_base 5: mod_base = OTHER; note = 2'-O-methyladenosine-3'-phosphate
  modified_base 6: mod_base = OTHER; note = 2'-O-docosanyl-adenosine-3'-phosphate
  modified_base 7: mod_base = OTHER; note = 2'-deoxy-2'-fluorouridine-3'-phosphate
  modified_base 8: mod_base = OTHER; note = 2'-O-methyladenosine-3'-phosphate
  modified_base 9: mod_base = OTHER; note = 2'-deoxy-2'-fluorouridine-3'-phosphate
  modified_base 10: mod_base = OTHER; note = 2'-deoxy-2'-fluorocytidine-3'-phosphate
  modified_base 11: mod_base = OTHER; note = 2'-deoxy-2'-fluorouridine-3'-phosphate
  modified_base 12: mod_base = OTHER; note = 2'-O-methyluridine-3'-phosphate
  modified_base 13: mod_base = OTHER; note = 2'-O-methyluridine-3'-phosphate
  modified_base 14: mod_base = OTHER; note = 2'-O-methylguanosine-3'-phosphate
  modified_base 15: mod_base = OTHER; note = 2'-O-methyladenosine-3'-phosphate
  modified_base 16: mod_base = OTHER; note = 2'-O-methylguanosine-3'-phosphate
  modified_base 17: mod_base = OTHER; note = 2'-O-methyluridine-3'-phosphate
  modified_base 18: mod_base = OTHER; note = 2'-O-methylcytidine-3'-phosphate
  modified_base 19: mod_base = OTHER; note = 2'-O-methylcytidine-3'-phosphorothioate
  modified_base 20: mod_base = OTHER; note = 2'-O-methyluridine-3'-phosphorothioate
  modified_base 21: mod_base = OTHER; note = 2'-O-methyladenosine
tgtgaatatctttgagtccta

SEQ ID NO: 14932 - RNA, 21 nt, synthetic construct
  source 1..21: mol_type = other RNA
  modified_base 1: mod_base = OTHER; note = 2'-O-methyladenosine-3'-phosphorothioate
  modified_base 2: mod_base = OTHER; note = 2'-O-methyladenosine-3'-phosphorothioate
  modified_base 3: mod_base = OTHER; note = 2'-O-methylguanosine-3'-phosphate
  modified_base 4: mod_base = OTHER; note = 2'-O-methylcytidine-3'-phosphate
  modified_base 5: mod_base = OTHER; note = 2'-O-methylcytidine-3'-phosphate
  modified_base 6: mod_base = OTHER; note = 2'-O-docosanyl-uridine-3'-phosphate
  modified_base 7: mod_base = OTHER; note = 2'-deoxy-2'-fluoroadenosine-3'-phosphate
  modified_base 8: mod_base = OTHER; note = 2'-O-methyladenosine-3'-phosphate
  modified_base 9: mod_base = OTHER; note = 2'-deoxy-2'-fluorouridine-3'-phosphate
  modified_base 10: mod_base = OTHER; note = 2'-deoxy-2'-fluoroguanosine-3'-phosphate
  modified_base 11: mod_base = OTHER; note = 2'-deoxy-2'-fluoroadenosine-3'-phosphate
  modified_base 12: mod_base = OTHER; note = 2'-O-methyluridine-3'-phosphate
  modified_base 13: mod_base = OTHER; note = 2'-O-methylguanosine-3'-phosphate
  modified_base 14: mod_base = OTHER; note = 2'-O-methyladenosine-3'-phosphate
  modified_base 15: mod_base = OTHER; note = 2'-O-methyluridine-3'-phosphate
  modified_base 16: mod_base = OTHER; note = 2'-O-methyladenosine-3'-phosphate
  modified_base 17: mod_base = OTHER; note = 2'-O-methyladenosine-3'-phosphate
  modified_base 18: mod_base = OTHER; note = 2'-O-methyluridine-3'-phosphate
  modified_base 19: mod_base = OTHER; note = 2'-O-methyluridine-3'-phosphorothioate
  modified_base 20: mod_base = OTHER; note = 2'-O-methyladenosine-3'-phosphorothioate
  modified_base 21: mod_base = OTHER; note = 2'-O-methyladenosine
aagcctaatgatgataattaa

SEQ ID NO: 14933 - RNA, 21 nt, synthetic construct
  source 1..21: mol_type = other RNA
  modified_base 1: mod_base = OTHER; note = 2'-O-methyladenosine-3'-phosphorothioate
  modified_base 2: mod_base = OTHER; note = 2'-O-methyladenosine-3'-phosphorothioate
  modified_base 3: mod_base = OTHER; note = 2'-O-methylguanosine-3'-phosphate
  modified_base 4: mod_base = OTHER; note = 2'-O-methylcytidine-3'-phosphate
  modified_base 5: mod_base = OTHER; note = 2'-O-methylcytidine-3'-phosphate
  modified_base 6: mod_base = OTHER; note = 2'-O-docosanyl-uridine-3'-phosphate
  modified_base 7: mod_base = OTHER; note = 2'-deoxy-2'-fluoroadenosine-3'-phosphate
  modified_base 8: mod_base = OTHER; note = 2'-O-methyladenosine-3'-phosphate
  modified_base 9: mod_base = OTHER; note = 2'-deoxy-2'-fluorouridine-3'-phosphate
  modified_base 10: mod_base = OTHER; note = 2'-deoxy-2'-fluoroguanosine-3'-phosphate
  modified_base 11: mod_base = OTHER; note = 2'-deoxy-2'-fluoroadenosine-3'-phosphate
  modified_base 12: mod_base = OTHER; note = 2'-O-methyluridine-3'-phosphate
  modified_base 13: mod_base = OTHER; note = 2'-O-methylguanosine-3'-phosphate
  modified_base 14: mod_base = OTHER; note = 2'-O-methyladenosine-3'-phosphate
  modified_base 15: mod_base = OTHER; note = 2'-O-methyluridine-3'-phosphate
  modified_base 16: mod_base = OTHER; note = 2'-O-methyladenosine-3'-phosphate
  modified_base 17: mod_base = OTHER; note = 2'-O-methyladenosine-3'-phosphate
  modified_base 18: mod_base = OTHER; note = 2'-O-methyluridine-3'-phosphate
  modified_base 19: mod_base = OTHER; note = 2'-O-methyluridine-3'-phosphorothioate
  modified_base 20: mod_base = OTHER; note = 2'-O-methyladenosine-3'-phosphorothioate
  modified_base 21: mod_base = OTHER; note = 2'-O-methyladenosine
aagcctaatgatgataattaa

SEQ ID NO: 14934 - RNA, 21 nt, synthetic construct
  source 1..21: mol_type = other RNA
  modified_base 1: mod_base = OTHER; note = 2'-O-methyladenosine-3'-phosphorothioate
  modified_base 2: mod_base = OTHER; note = 2'-O-methyluridine-3'-phosphorothioate
  modified_base 3: mod_base = OTHER; note = 2'-O-methyladenosine-3'-phosphate
  modified_base 4: mod_base = OTHER; note = 2'-O-methyluridine-3'-phosphate
  modified_base 5: mod_base = OTHER; note = 2'-O-methylcytidine-3'-phosphate
  modified_base 6: mod_base = OTHER; note = 2'-O-docosanyl-uridine-3'-phosphate
  modified_base 7: mod_base = OTHER; note = 2'-deoxy-2'-fluorocytidine-3'-phosphate
  modified_base 8: mod_base = OTHER; note = 2'-O-methyladenosine-3'-phosphate
  modified_base 9: mod_base = OTHER; note = 2'-deoxy-2'-fluoroadenosine-3'-phosphate
  modified_base 10: mod_base = OTHER; note = 2'-deoxy-2'-fluorocytidine-3'-phosphate
  modified_base 11: mod_base = OTHER; note = 2'-deoxy-2'-fluorouridine-3'-phosphate
  modified_base 12: mod_base = OTHER; note = 2'-O-methyluridine-3'-phosphate
  modified_base 13: mod_base = OTHER; note = 2'-O-methyluridine-3'-phosphate
  modified_base 14: mod_base = OTHER; note = 2'-O-methylguanosine-3'-phosphate
  modified_base 15: mod_base = OTHER; note = 2'-O-methyluridine-3'-phosphate
  modified_base 16: mod_base = OTHER; note = 2'-O-methylguanosine-3'-phosphate
  modified_base 17: mod_base = OTHER; note = 2'-O-methyluridine-3'-phosphate
  modified_base 18: mod_base = OTHER; note = 2'-O-methylcytidine-3'-phosphate
  modified_base 19: mod_base = OTHER; note = 2'-O-methyladenosine-3'-phosphorothioate
  modified_base 20: mod_base = OTHER; note = 2'-O-methyladenosine-3'-phosphorothioate
  modified_base 21: mod_base = OTHER; note = 2'-O-methyladenosine
atatctcaactttgtgtcaaa

SEQ ID NO: 14935 - RNA, 21 nt, synthetic construct
  source 1..21: mol_type = other RNA
  modified_base 1: mod_base = OTHER; note = 2'-O-methyladenosine-3'-phosphorothioate
  modified_base 2: mod_base = OTHER; note = 2'-O-methyluridine-3'-phosphorothioate
  modified_base 3: mod_base = OTHER; note = 2'-O-methylguanosine-3'-phosphate
  modified_base 4: mod_base = OTHER; note = 2'-O-methylcytidine-3'-phosphate
  modified_base 5: mod_base = OTHER; note = 2'-O-methyluridine-3'-phosphate
  modified_base 6: mod_base = OTHER; note = 2'-O-docosanyl-uridine-3'-phosphate
  modified_base 7: mod_base = OTHER; note = 2'-deoxy-2'-fluoroguanosine-3'-phosphate
  modified_base 8: mod_base = OTHER; note = 2'-O-methyladenosine-3'-phosphate
  modified_base 9: mod_base = OTHER; note = 2'-deoxy-2'-fluorouridine-3'-phosphate
  modified_base 10: mod_base = OTHER; note = 2'-deoxy-2'-fluoroguanosine-3'-phosphate
  modified_base 11: mod_base = OTHER; note = 2'-deoxy-2'-fluoroadenosine-3'-phosphate
  modified_base 12: mod_base = OTHER; note = 2'-O-methyluridine-3'-phosphate
  modified_base 13: mod_base = OTHER; note = 2'-O-methyladenosine-3'-phosphate
  modified_base 14: mod_base = OTHER; note = 2'-O-methylcytidine-3'-phosphate
  modified_base 15: mod_base = OTHER; note = 2'-O-methyladenosine-3'-phosphate
  modified_base 16: mod_base = OTHER; note = 2'-O-methyladenosine-3'-phosphate
  modified_base 17: mod_base = OTHER; note = 2'-O-methyluridine-3'-phosphate
  modified_base 18: mod_base = OTHER; note = 2'-O-methylguanosine-3'-phosphate
  modified_base 19: mod_base = OTHER; note = 2'-O-methyladenosine-3'-phosphorothioate
  modified_base 20: mod_base = OTHER; note = 2'-O-methyladenosine-3'-phosphorothioate
  modified_base 21: mod_base = OTHER; note = 2'-O-methyladenosine
atgcttgatgatacaatgaaa

SEQ ID NO: 14936 - RNA, 21 nt, synthetic construct
  source 1..21: mol_type = other RNA
  modified_base 1: mod_base = OTHER; note = 2'-O-methylguanosine-3'-phosphorothioate
  modified_base 2: mod_base = OTHER; note = 2'-O-methyluridine-3'-phosphorothioate
  modified_base 3: mod_base = OTHER; note = 2'-O-methylguanosine-3'-phosphate
  modified_base 4: mod_base = OTHER; note = 2'-O-methyluridine-3'-phosphate
  modified_base 5: mod_base = OTHER; note = 2'-O-methyladenosine-3'-phosphate
  modified_base 6: mod_base = OTHER; note = 2'-O-docosanyl-uridine-3'-phosphate
  modified_base 7: mod_base = OTHER; note = 2'-deoxy-2'-fluoroguanosine-3'-phosphate
  modified_base 8: mod_base = OTHER; note = 2'-O-methyluridine-3'-phosphate
  modified_base 9: mod_base = OTHER; note = 2'-deoxy-2'-fluorocytidine-3'-phosphate
  modified_base 10: mod_base = OTHER; note = 2'-deoxy-2'-fluorouridine-3'-phosphate
  modified_base 11: mod_base = OTHER; note = 2'-deoxy-2'-fluorouridine-3'-phosphate
  modified_base 12: mod_base = OTHER; note = 2'-O-methyluridine-3'-phosphate
  modified_base 13: mod_base = OTHER; note = 2'-O-methyluridine-3'-phosphate
  modified_base 14: mod_base = OTHER; note = 2'-O-methylguanosine-3'-phosphate
  modified_base 15: mod_base = OTHER; note = 2'-O-methyluridine-3'-phosphate
  modified_base 16: mod_base = OTHER; note = 2'-O-methylguanosine-3'-phosphate
  modified_base 17: mod_base = OTHER; note = 2'-O-methyluridine-3'-phosphate
  modified_base 18: mod_base = OTHER; note = 2'-O-methylguanosine-3'-phosphate
  modified_base 19: mod_base = OTHER; note = 2'-O-methyladenosine-3'-phosphorothioate
  modified_base 20: mod_base = OTHER; note = 2'-O-methyluridine-3'-phosphorothioate
  modified_base 21: mod_base = OTHER; note = 2'-O-methyladenosine
gtgtatgtcttttgtgtgata

SEQ ID NO: 14937 - RNA, 21 nt, synthetic construct
  source 1..21: mol_type = other RNA
  modified_base 1: mod_base = OTHER; note = 2'-O-methylcytidine-3'-phosphorothioate
  modified_base 2: mod_base = OTHER; note = 2'-O-methyluridine-3'-phosphorothioate
  modified_base 3: mod_base = OTHER; note = 2'-O-methyladenosine-3'-phosphate
  modified_base 4: mod_base = OTHER; note = 2'-O-methyladenosine-3'-phosphate
  modified_base 5: mod_base = OTHER; note = 2'-O-methyluridine-3'-phosphate
  modified_base 6: mod_base = OTHER; note = 2'-O-methylguanosine-3'-phosphate
  modified_base 7: mod_base = OTHER; note = 2'-deoxy-2'-fluoroadenosine-3'-phosphate
  modified_base 8: mod_base = OTHER; note = 2'-O-methyluridine-3'-phosphate
  modified_base 9: mod_base = OTHER; note = 2'-deoxy-2'-fluoroguanosine-3'-phosphate
  modified_base 10: mod_base = OTHER; note = 2'-deoxy-2'-fluoroadenosine-3'-phosphate
  modified_base 11: mod_base = OTHER; note = 2'-deoxy-2'-fluorouridine-3'-phosphate
  modified_base 12: mod_base = OTHER; note = 2'-O-methyladenosine-3'-phosphate
  modified_base 13: mod_base = OTHER; note = 2'-O-methyladenosine-3'-phosphate
  modified_base 14: mod_base = OTHER; note = 2'-O-methyluridine-3'-phosphate
  modified_base 15: mod_base = OTHER; note = 2'-O-methyluridine-3'-phosphate
  modified_base 16: mod_base = OTHER; note = 2'-O-docosanyl-adenosine-3'-phosphate
  modified_base 17: mod_base = OTHER; note = 2'-O-methyluridine-3'-phosphate
  modified_base 18: mod_base = OTHER; note = 2'-O-methylguanosine-3'-phosphate
  modified_base 19: mod_base = OTHER; note = 2'-O-methyluridine-3'-phosphorothioate
  modified_base 20: mod_base = OTHER; note = 2'-O-methyluridine-3'-phosphorothioate
  modified_base 21: mod_base = OTHER; note = 2'-O-methyladenosine
ctaatgatgataattatgtta

SEQ ID NO: 14938 - RNA, 21 nt, synthetic construct
  source 1..21: mol_type = other RNA
  modified_base 1: mod_base = OTHER; note = 2'-O-methyluridine-3'-phosphorothioate
  modified_base 2: mod_base = OTHER; note = 2'-O-methylguanosine-3'-phosphorothioate
  modified_base 3: mod_base = OTHER; note = 2'-O-methyladenosine-3'-phosphate
  modified_base 4: mod_base = OTHER; note = 2'-O-methyladenosine-3'-phosphate
  modified_base 5: mod_base = OTHER; note = 2'-O-methyluridine-3'-phosphate
  modified_base 6: mod_base = OTHER; note = 2'-O-methylguanosine-3'-phosphate
  modified_base 7: mod_base = OTHER; note = 2'-deoxy-2'-fluorouridine-3'-phosphate
  modified_base 8: mod_base = OTHER; note = 2'-O-methylguanosine-3'-phosphate
  modified_base 9: mod_base = OTHER; note = 2'-deoxy-2'-fluoroadenosine-3'-phosphate
  modified_base 10: mod_base = OTHER; note = 2'-deoxy-2'-fluoroadenosine-3'-phosphate
  modified_base 11: mod_base = OTHER; note = 2'-deoxy-2'-fluorouridine-3'-phosphate
  modified_base 12: mod_base = OTHER; note = 2'-O-methyladenosine-3'-phosphate
  modified_base 13: mod_base = OTHER; note = 2'-O-methyluridine-3'-phosphate
  modified_base 14: mod_base = OTHER; note = 2'-O-methylcytidine-3'-phosphate
  modified_base 15: mod_base = OTHER; note = 2'-O-methyluridine-3'-phosphate
  modified_base 16: mod_base = OTHER; note = 2'-O-docosanyl-uridine-3'-phosphate
  modified_base 17: mod_base = OTHER; note = 2'-O-methyluridine-3'-phosphate
  modified_base 18: mod_base = OTHER; note = 2'-O-methylguanosine-3'-phosphate
  modified_base 19: mod_base = OTHER; note = 2'-O-methyladenosine-3'-phosphorothioate
  modified_base 20: mod_base = OTHER; note = 2'-O-methylguanosine-3'-phosphorothioate
  modified_base 21: mod_base = OTHER; note = 2'-O-methyladenosine
tgaatgtgaatatctttgaga

SEQ ID NO: 14939 - RNA, 21 nt, synthetic construct
  source 1..21: mol_type = other RNA
  modified_base 1: mod_base = OTHER; note = 2'-O-methylguanosine-3'-phosphorothioate
  modified_base 2: mod_base = OTHER; note = 2'-O-methyladenosine-3'-phosphorothioate
  modified_base 3: mod_base = OTHER; note = 2'-O-methyladenosine-3'-phosphate
  modified_base 4: mod_base = OTHER; note = 2'-O-methyladenosine-3'-phosphate
  modified_base 5: mod_base = OTHER; note = 2'-O-methyluridine-3'-phosphate
  modified_base 6: mod_base = OTHER; note = 2'-O-methylguanosine-3'-phosphate
  modified_base 7: mod_base = OTHER; note = 2'-deoxy-2'-fluorocytidine-3'-phosphate
  modified_base 8: mod_base = OTHER; note = 2'-O-methyluridine-3'-phosphate
  modified_base 9: mod_base = OTHER; note = 2'-deoxy-2'-fluorouridine-3'-phosphate
  modified_base 10: mod_base = OTHER; note = 2'-deoxy-2'-fluoroguanosine-3'-phosphate
  modified_base 11: mod_base = OTHER; note = 2'-deoxy-2'-fluoroadenosine-3'-phosphate
  modified_base 12: mod_base = OTHER; note = 2'-O-methyluridine-3'-phosphate
  modified_base 13: mod_base = OTHER; note = 2'-O-methylguanosine-3'-phosphate
  modified_base 14: mod_base = OTHER; note = 2'-O-methyladenosine-3'-phosphate
  modified_base 15: mod_base = OTHER; note = 2'-O-methyluridine-3'-phosphate
  modified_base 16: mod_base = OTHER; note = 2'-O-docosanyl-adenosine-3'-phosphate
  modified_base 17: mod_base = OTHER; note = 2'-O-methylcytidine-3'-phosphate
  modified_base 18: mod_base = OTHER; note = 2'-O-methyladenosine-3'-phosphate
  modified_base 19: mod_base = OTHER; note = 2'-O-methyladenosine-3'-phosphorothioate
  modified_base 20: mod_base = OTHER; note = 2'-O-methyluridine-3'-phosphorothioate
  modified_base 21: mod_base = OTHER; note = 2'-O-methyladenosine
gaaatgcttgatgatacaata

SEQ ID NO: 14940 - RNA, 23 nt, synthetic construct
  source 1..23: mol_type = other RNA
  modified_base 1: mod_base = OTHER; note = 2'-O-methyluridine-3'-phosphorothioate 5'-(E)-Vinylphosphonate
  modified_base 2: mod_base = OTHER; note = 2'-deoxy-2'-fluoroadenosine-3'-phosphorothioate
  modified_base 3: mod_base = OTHER; note = 2'-O-methyladenosine-3'-phosphate
  modified_base 4: mod_base = OTHER; note = 2'-O-methylguanosine-3'-phosphate
  modified_base 5: mod_base = OTHER; note = 2'-O-methyluridine-3'-phosphate
  modified_base 6: mod_base = OTHER; note = 2'-deoxy-2'-fluorouridine-3'-phosphate
  modified_base 7: mod_base = OTHER; note = 2'-O-methyluridine-3'-phosphate
  modified_base 8: mod_base = OTHER; note = 2'-O-methylguanosine-3'-phosphate
  modified_base 9: mod_base = OTHER; note = 2'-O-methyladenosine-3'-phosphate
  modified_base 10: mod_base = OTHER; note = 2'-O-methyladenosine-3'-phosphate
  modified_base 11: mod_base = OTHER; note = 2'-O-methylguanosine-3'-phosphate
  modified_base 12: mod_base = OTHER; note = 2'-O-methyladenosine-3'-phosphate
  modified_base 13: mod_base = OTHER; note = 2'-O-methyladenosine-3'-phosphate
  modified_base 14: mod_base = OTHER; note = 2'-deoxy-2'-fluorouridine-3'-phosphate
  modified_base 15: mod_base = OTHER; note = 2'-O-methylcytidine-3'-phosphate
  modified_base 16: mod_base = OTHER; note = 2'-deoxy-2'-fluoroadenosine-3'-phosphate
  modified_base 17: mod_base = OTHER; note = 2'-O-methylcytidine-3'-phosphate
  modified_base 18: mod_base = OTHER; note = 2'-O-methyladenosine-3'-phosphate
  modified_base 19: mod_base = OTHER; note = 2'-O-methylcytidine-3'-phosphate
  modified_base 20: mod_base = OTHER; note = 2'-O-methyladenosine-3'-phosphate
  modified_base 21: mod_base = OTHER; note = 2'-O-methyladenosine-3'-phosphorothioate
  modified_base 22: mod_base = OTHER; note = 2'-O-methyladenosine-3'-phosphorothioate
  modified_base 23: mod_base = OTHER; note = 2'-O-methyladenosine
taagtttgaagaatcacacaaaa

SEQ ID NO: 14941 - RNA, 23 nt, synthetic construct
  source 1..23: mol_type = other RNA
  modified_base 1: mod_base = OTHER; note = 2'-O-methyluridine-3'-phosphorothioate 5'-(E)-Vinylphosphonate
  modified_base 2: mod_base = OTHER; note = 2'-deoxy-2'-fluorocytidine-3'-phosphorothioate
  modified_base 3: mod_base = OTHER; note = 2'-O-methyladenosine-3'-phosphate
  modified_base 4: mod_base = OTHER; note = 2'-O-methylcytidine-3'-phosphate
  modified_base 5: mod_base = OTHER; note = 2'-O-methyladenosine-3'-phosphate
  modified_base 6: mod_base = OTHER; note = 2'-deoxy-2'-fluorocytidine-3'-phosphate
  modified_base 7: mod_base = OTHER; note = 2'-O-methyladenosine-3'-phosphate
  modified_base 8: mod_base = OTHER; note = 2'-O-methyladenosine-3'-phosphate
  modified_base 9: mod_base = OTHER; note = 2'-O-methyladenosine-3'-phosphate
  modified_base 10: mod_base = OTHER; note = 2'-O-methyladenosine-3'-phosphate
  modified_base 11: mod_base = OTHER; note = 2'-O-methylguanosine-3'-phosphate
  modified_base 12: mod_base = OTHER; note = 2'-O-methyladenosine-3'-phosphate
  modified_base 13: mod_base = OTHER; note = 2'-O-methylcytidine-3'-phosphate
  modified_base 14: mod_base = OTHER; note = 2'-deoxy-2'-fluoroadenosine-3'-phosphate
  modified_base 15: mod_base = OTHER; note = 2'-O-methyluridine-3'-phosphate
  modified_base 16: mod_base = OTHER; note = 2'-deoxy-2'-fluoroadenosine-3'-phosphate
  modified_base 17: mod_base = OTHER; note = 2'-O-methylcytidine-3'-phosphate
  modified_base 18: mod_base = OTHER; note = 2'-O-methyladenosine-3'-phosphate
  modified_base 19: mod_base = OTHER; note = 2'-O-methylcytidine-3'-phosphate
  modified_base 20: mod_base = OTHER; note = 2'-O-methyladenosine-3'-phosphate
  modified_base 21: mod_base = OTHER; note = 2'-O-methylcytidine-3'-phosphorothioate
  modified_base 22: mod_base = OTHER; note = 2'-O-methyluridine-3'-phosphorothioate
  modified_base 23: mod_base = OTHER; note = 2'-O-methyluridine
tcacacaaaagacatacacactt

SEQ ID NO: 14942 - RNA, 23 nt, synthetic construct
  source 1..23: mol_type = other RNA
  modified_base 1: mod_base = OTHER; note = 2'-O-methyluridine-3'-phosphorothioate 5'-(E)-Vinylphosphonate
  modified_base 2: mod_base = OTHER; note = 2'-deoxy-2'-fluoroguanosine-3'-phosphorothioate
  modified_base 3: mod_base = OTHER; note = 2'-O-methyluridine-3'-phosphate
  modified_base 4: mod_base = OTHER; note = 2'-O-methyladenosine-3'-phosphate
  modified_base 5: mod_base = OTHER; note = 2'-O-methyladenosine-3'-phosphate
  modified_base 6: mod_base = OTHER; note = 2'-deoxy-2'-fluorocytidine-3'-phosphate
  modified_base 7: mod_base = OTHER; note = 2'-O-methyladenosine-3'-phosphate
  modified_base 8: mod_base = OTHER; note = 2'-O-methyluridine-3'-phosphate
  modified_base 9: mod_base = OTHER; note = 2'-O-methyluridine-3'-phosphate
  modified_base 10: mod_base = OTHER; note = 2'-O-methylguanosine-3'-phosphate
  modified_base 11: mod_base = OTHER; note = 2'-O-methyluridine-3'-phosphate
  modified_base 12: mod_base = OTHER; note = 2'-O-methyluridine-3'-phosphate
  modified_base 13: mod_base = OTHER; note = 2'-O-methylguanosine-3'-phosphate
  modified_base 14: mod_base = OTHER; note = 2'-deoxy-2'-fluoroguanosine-3'-phosphate
  modified_base 15: mod_base = OTHER; note = 2'-O-methyladenosine-3'-phosphate
  modified_base 16: mod_base = OTHER; note = 2'-deoxy-2'-fluoroadenosine-3'-phosphate
  modified_base 17: mod_base = OTHER; note = 2'-O-methylcytidine-3'-phosphate
  modified_base 18: mod_base = OTHER; note = 2'-O-methyluridine-3'-phosphate
  modified_base 19: mod_base = OTHER; note = 2'-O-methyladenosine-3'-phosphate
  modified_base 20: mod_base = OTHER; note = 2'-O-methyluridine-3'-phosphate
  modified_base 21: mod_base = OTHER; note = 2'-O-methylguanosine-3'-phosphorothioate
  modified_base 22: mod_base = OTHER; note = 2'-O-methyladenosine-3'-phosphorothioate
  modified_base 23: mod_base = OTHER; note = 2'-O-methylcytidine
tgtaacattgttggaactatgac

SEQ ID NO: 14943 - RNA, 23 nt, synthetic construct
  source 1..23: mol_type = other RNA
  modified_base 1: mod_base = OTHER; note = 2'-O-methyluridine-3'-phosphorothioate 5'-(E)-Vinylphosphonate
  modified_base 2: mod_base = OTHER; note = 2'-deoxy-2'-fluoroadenosine-3'-phosphorothioate
  modified_base 3: mod_base = OTHER; note = 2'-O-methylguanosine-3'-phosphate
  modified_base 4: mod_base = OTHER; note = 2'-O-methylguanosine-3'-phosphate
  modified_base 5: mod_base = OTHER; note = 2'-O-methyladenosine-3'-phosphate
  modified_base 6: mod_base = OTHER; note = 2'-deoxy-2'-fluorocytidine-3'-phosphate
  modified_base 7: mod_base = OTHER; note = 2'-O-methyluridine-3'-phosphate
  modified_base 8: mod_base = OTHER; note = 2'-O-methylcytidine-3'-phosphate
  modified_base 9: mod_base = OTHER; note = 2'-O-methyladenosine-3'-phosphate
  modified_base 10: mod_base = OTHER; note = 2'-O-methyladenosine-3'-phosphate
  modified_base 11: mod_base = OTHER; note = 2'-O-methyladenosine-3'-phosphate
  modified_base 12: mod_base = OTHER; note = 2'-O-methylguanosine-3'-phosphate
  modified_base 13: mod_base = OTHER; note = 2'-O-methyladenosine-3'-phosphate
  modified_base 14: mod_base = OTHER; note = 2'-deoxy-2'-fluorouridine-3'-phosphate
  modified_base 15: mod_base = OTHER; note = 2'-O-methyladenosine-3'-phosphate
  modified_base 16: mod_base = OTHER; note = 2'-deoxy-2'-fluorouridine-3'-phosphate
  modified_base 17: mod_base = OTHER; note = 2'-O-methyluridine-3'-phosphate
  modified_base 18: mod_base = OTHER; note = 2'-O-methylcytidine-3'-phosphate
  modified_base 19: mod_base = OTHER; note = 2'-O-methyladenosine-3'-phosphate
  modified_base 20: mod_base = OTHER; note = 2'-O-methylcytidine-3'-phosphate
  modified_base 21: mod_base = OTHER; note = 2'-O-methyladenosine-3'-phosphorothioate
  modified_base 22: mod_base = OTHER; note = 2'-O-methyluridine-3'-phosphorothioate
  modified_base 23: mod_base = OTHER; note = 2'-O-methyluridine
taggactcaaagatattcacatt

SEQ ID NO: 14944 - RNA, 23 nt, synthetic construct
  source 1..23: mol_type = other RNA
  modified_base 1: mod_base = OTHER; note = 2'-O-methyluridine-3'-phosphorothioate 5'-(E)-Vinylphosphonate
  modified_base 2: mod_base = OTHER; note = 2'-deoxy-2'-fluorouridine-3'-phosphorothioate
  modified_base 3: mod_base = OTHER; note = 2'-O-methyladenosine-3'-phosphate
  modified_base 4: mod_base = OTHER; note = 2'-O-methyladenosine-3'-phosphate
  modified_base 5: mod_base = OTHER; note = 2'-O-methyluridine-3'-phosphate
  modified_base 6: mod_base = OTHER; note = 2'-deoxy-2'-fluorouridine-3'-phosphate
  modified_base 7: mod_base = OTHER; note = 2'-O-methyladenosine-3'-phosphate
  modified_base 8: mod_base = OTHER; note = 2'-O-methyluridine-3'-phosphate
  modified_base 9: mod_base = OTHER; note = 2'-O-methylcytidine-3'-phosphate
  modified_base 10: mod_base = OTHER; note = 2'-O-methyladenosine-3'-phosphate
  modified_base 11: mod_base = OTHER; note = 2'-O-methyluridine-3'-phosphate
  modified_base 12: mod_base = OTHER; note = 2'-O-methylcytidine-3'-phosphate
  modified_base 13: mod_base = OTHER; note = 2'-O-methyladenosine-3'-phosphate
  modified_base 14: mod_base = OTHER; note = 2'-deoxy-2'-fluorouridine-3'-phosphate
  modified_base 15: mod_base = OTHER; note = 2'-O-methyluridine-3'-phosphate
  modified_base 16: mod_base = OTHER; note = 2'-deoxy-2'-fluoroadenosine-3'-phosphate
  modified_base 17: mod_base = OTHER; note = 2'-O-methylguanosine-3'-phosphate
  modified_base 18: mod_base = OTHER; note = 2'-O-methylguanosine-3'-phosphate
  modified_base 19: mod_base = OTHER; note = 2'-O-methylcytidine-3'-phosphate
  modified_base 20: mod_base = OTHER; note = 2'-O-methyluridine-3'-phosphate
  modified_base 21: mod_base = OTHER; note = 2'-O-methyluridine-3'-phosphorothioate
  modified_base 22: mod_base = OTHER; note = 2'-O-methyluridine-3'-phosphorothioate
  modified_base 23: mod_base = OTHER; note = 2'-O-methylguanosine
ttaattatcatcattaggctttg

SEQ ID NO: 14945 - DNA, 23 bp, synthetic construct
  source 1..23: mol_type = other DNA
  modified_base 1: mod_base = OTHER; note = 2'-O-methyluridine-3'-phosphorothioate 5'-(E)-Vinylphosphonate
  modified_base 2: mod_base = OTHER; note = 2'-deoxy-2'-fluorouridine-3'-phosphorothioate
  modified_base 3: mod_base = OTHER; note = 2'-O-methyladenosine-3'-phosphate
  modified_base 4: mod_base = OTHER; note = 2'-O-methyladenosine-3'-phosphate
  modified_base 6: mod_base = OTHER; note = 2'-O-methyluridine-3'-phosphate
  modified_base 7: mod_base = OTHER; note = Adenosine-glycol nucleic acid (GNA), S-isomer
  modified_base 8: mod_base = OTHER; note = 2'-O-methyluridine-3'-phosphate
  modified_base 9: mod_base = OTHER; note = 2'-O-methylcytidine-3'-phosphate
  modified_base 10: mod_base = OTHER; note = 2'-O-methyladenosine-3'-phosphate
  modified_base 11: mod_base = OTHER; note = 2'-O-methyluridine-3'-phosphate
  modified_base 12: mod_base = OTHER; note = 2'-O-methylcytidine-3'-phosphate
  modified_base 13: mod_base = OTHER; note = 2'-O-methyladenosine-3'-phosphate
  modified_base 14: mod_base = OTHER; note = 2'-deoxy-2'-fluorouridine-3'-phosphate
  modified_base 15: mod_base = OTHER; note = 2'-O-methyluridine-3'-phosphate
  modified_base 16: mod_base = OTHER; note = 2'-deoxy-2'-fluoroadenosine-3'-phosphate
  modified_base 17: mod_base = OTHER; note = 2'-O-methylguanosine-3'-phosphate
  modified_base 18: mod_base = OTHER; note = 2'-O-methylguanosine-3'-phosphate
  modified_base 19: mod_base = OTHER; note = 2'-O-methylcytidine-3'-phosphate
  modified_base 20: mod_base = OTHER; note = 2'-O-methyluridine-3'-phosphate
  modified_base 21: mod_base = OTHER; note = 2'-O-methyluridine-3'-phosphorothioate
  modified_base 22: mod_base = OTHER; note = 2'-O-methyluridine-3'-phosphorothioate
  modified_base 23: mod_base = OTHER; note = 2'-O-methylguanosine
  misc_feature 1..4: note = RNA
  misc_feature 6..23: note = RNA
  misc_feature 5: note = DNA
ttaattatcatcattaggctttg

SEQ ID NO: 14946 - DNA, 23 bp, synthetic construct
  source 1..23: mol_type = other DNA
  modified_base 1: mod_base = OTHER; note = 2'-O-methyluridine-3'-phosphorothioate 5'-(E)-Vinylphosphonate
  modified_base 2: mod_base = OTHER; note = 2'-deoxy-2'-fluorouridine-3'-phosphorothioate
  modified_base 3: mod_base = OTHER; note = 2'-O-methyluridine-3'-phosphate
  modified_base 4: mod_base = OTHER; note = 2'-O-methylguanosine-3'-phosphate
  modified_base 6: mod_base = OTHER; note = 2'-O-methylcytidine-3'-phosphate
  modified_base 7: mod_base = OTHER; note = Adenosine-glycol nucleic acid (GNA), S-isomer
  modified_base 8: mod_base = OTHER; note = 2'-O-methylcytidine-3'-phosphate
  modified_base 9: mod_base = OTHER; note = 2'-O-methyladenosine-3'-phosphate
  modified_base 10: mod_base = OTHER; note = 2'-O-methyladenosine-3'-phosphate
  modified_base 11: mod_base = OTHER; note = 2'-O-methyladenosine-3'-phosphate
  modified_base 12: mod_base = OTHER; note = 2'-O-methylguanosine-3'-phosphate
  modified_base 13: mod_base = OTHER; note = 2'-O-methyluridine-3'-phosphate
  modified_base 14: mod_base = OTHER; note = 2'-deoxy-2'-fluorouridine-3'-phosphate
  modified_base 15: mod_base = OTHER; note = 2'-O-methylguanosine-3'-phosphate
  modified_base 16: mod_base = OTHER; note = 2'-deoxy-2'-fluoroadenosine-3'-phosphate
  modified_base 17: mod_base = OTHER; note = 2'-O-methylguanosine-3'-phosphate
  modified_base 18: mod_base = OTHER; note = 2'-O-methyladenosine-3'-phosphate
  modified_base 19: mod_base = OTHER; note = 2'-O-methyluridine-3'-phosphate
  modified_base 20: mod_base = OTHER; note = 2'-O-methyladenosine-3'-phosphate
  modified_base 21: mod_base = OTHER; note = 2'-O-methyluridine-3'-phosphorothioate
  modified_base 22: mod_base = OTHER; note = 2'-O-methyladenosine-3'-phosphorothioate
  modified_base 23: mod_base = OTHER; note = 2'-O-methylguanosine
  misc_feature 1..4: note = RNA
  misc_feature 6..23: note = RNA
  misc_feature 5: note = DNA
tttgacacaaagttgagatatag

SEQ ID NO: 14947 - DNA, 23 bp, synthetic construct
  source 1..23: mol_type = other DNA
  modified_base 1: mod_base = OTHER; note = 2'-O-methyluridine-3'-phosphorothioate 5'-(E)-Vinylphosphonate
  modified_base 2: mod_base = OTHER; note = 2'-deoxy-2'-fluorouridine-3'-phosphorothioate
  modified_base 3: mod_base = OTHER; note = 2'-O-methyluridine-3'-phosphate
  modified_base 4: mod_base = OTHER; note = 2'-O-methylcytidine-3'-phosphate
  modified_base 6: mod_base = OTHER; note = 2'-O-methyluridine-3'-phosphate
  modified_base 7: mod_base = OTHER; note = Thymidine-glycol nucleic acid (GNA), S-Isomer
  modified_base 8: mod_base = OTHER; note = 2'-O-methylguanosine-3'-phosphate
  modified_base 9: mod_base = OTHER; note = 2'-O-methyluridine-3'-phosphate
  modified_base 10: mod_base = OTHER; note = 2'-O-methyladenosine-3'-phosphate
  modified_base 11: mod_base = OTHER; note = 2'-O-methyluridine-3'-phosphate
  modified_base 12: mod_base = OTHER; note = 2'-O-methylcytidine-3'-phosphate
  modified_base 13: mod_base = OTHER; note = 2'-O-methyladenosine-3'-phosphate
  modified_base 14: mod_base = OTHER; note = 2'-deoxy-2'-fluorouridine-3'-phosphate
  modified_base 15: mod_base = OTHER; note = 2'-O-methylcytidine-3'-phosphate
  modified_base 16: mod_base = OTHER; note = 2'-deoxy-2'-fluoroadenosine-3'-phosphate
  modified_base 17: mod_base = OTHER; note = 2'-O-methyladenosine-3'-phosphate
  modified_base 18: mod_base = OTHER; note = 2'-O-methylguanosine-3'-phosphate
  modified_base 19: mod_base = OTHER; note = 2'-O-methylcytidine-3'-phosphate
  modified_base 20: mod_base = OTHER; note = 2'-O-methyladenosine-3'-phosphate
  modified_base 21: mod_base = OTHER; note = 2'-O-methyluridine-3'-phosphorothioate
  modified_base 22: mod_base = OTHER; note = 2'-O-methyluridine-3'-phosphorothioate
  modified_base 23: mod_base = OTHER; note = 2'-O-methyluridine
  misc_feature 1..4: note = RNA
  misc_feature 6..23: note = RNA
  misc_feature 5: note = DNA
tttcattgtatcatcaagcattt

SEQ ID NO: 14948 - DNA, 23 bp, synthetic construct
  source 1..23: mol_type = other DNA
  modified_base 1: mod_base = OTHER; note = 2'-O-methyluridine-3'-phosphorothioate 5'-(E)-Vinylphosphonate
  modified_base 2: mod_base = OTHER; note = 2'-deoxy-2'-fluoroadenosine-3'-phosphorothioate
  modified_base 3: mod_base = OTHER; note = 2'-O-methyluridine-3'-phosphate
  modified_base 4: mod_base = OTHER; note = 2'-O-methylcytidine-3'-phosphate
  modified_base 6: mod_base = OTHER; note = 2'-O-methylcytidine-3'-phosphate
  modified_base 7: mod_base = OTHER; note = Adenosine-glycol nucleic acid (GNA), S-isomer
  modified_base 8: mod_base = OTHER; note = 2'-O-methylcytidine-3'-phosphate
  modified_base 9: mod_base = OTHER; note = 2'-O-methyladenosine-3'-phosphate
  modified_base 10: mod_base = OTHER; note = 2'-O-methyladenosine-3'-phosphate
  modified_base 11: mod_base = OTHER; note = 2'-O-methyladenosine-3'-phosphate
  modified_base 12: mod_base = OTHER; note = 2'-O-methyladenosine-3'-phosphate
  modified_base 13: mod_base = OTHER; note = 2'-O-methylguanosine-3'-phosphate
  modified_base 14: mod_base = OTHER; note = 2'-deoxy-2'-fluoroadenosine-3'-phosphate
  modified_base 15: mod_base = OTHER; note = 2'-O-methylcytidine-3'-phosphate
  modified_base 16: mod_base = OTHER; note = 2'-deoxy-2'-fluoroadenosine-3'-phosphate
  modified_base 17: mod_base = OTHER; note = 2'-O-methyluridine-3'-phosphate
  modified_base 18: mod_base = OTHER; note = 2'-O-methyladenosine-3'-phosphate
  modified_base 19: mod_base = OTHER; note = 2'-O-methylcytidine-3'-phosphate
  modified_base 20: mod_base = OTHER; note = 2'-O-methyladenosine-3'-phosphate
  modified_base 21: mod_base = OTHER; note = 2'-O-methylcytidine-3'-phosphorothioate
  modified_base 22: mod_base = OTHER; note = 2'-O-methyladenosine-3'-phosphorothioate
  modified_base 23: mod_base = OTHER; note = 2'-O-methylcytidine
  misc_feature 1..4: note = RNA
  misc_feature 6..23: note = RNA
  misc_feature 5: note = DNA
tatcacacaaaagacatacacac

SEQ ID NO: 14949 - RNA, 23 nt, synthetic construct
  source 1..23: mol_type = other RNA
  modified_base 1: mod_base = OTHER; note = 2'-O-methyluridine-3'-phosphorothioate 5'-(E)-Vinylphosphonate
  modified_base 2: mod_base = OTHER; note = 2'-deoxy-2'-fluoroadenosine-3'-phosphorothioate
  modified_base 3: mod_base = OTHER; note = 2'-O-methyladenosine-3'-phosphate
  modified_base 4: mod_base = OTHER; note = 2'-O-methylcytidine-3'-phosphate
  modified_base 5: mod_base = OTHER; note = 2'-O-methyladenosine-3'-phosphate
  modified_base 6: mod_base = OTHER; note = 2'-deoxy-2'-fluorouridine-3'-phosphate
  modified_base 7: mod_base = OTHER; note = 2'-O-methyladenosine-3'-phosphate
  modified_base 8: mod_base = OTHER; note = 2'-O-methyladenosine-3'-phosphate
  modified_base 9: mod_base = OTHER; note = 2'-O-methyluridine-3'-phosphate
  modified_base 10: mod_base = OTHER; note = 2'-O-methyluridine-3'-phosphate
  modified_base 11: mod_base = OTHER; note = 2'-O-methyladenosine-3'-phosphate
  modified_base 12: mod_base = OTHER; note = 2'-O-methyluridine-3'-phosphate
  modified_base 13: mod_base = OTHER; note = 2'-O-methylcytidine-3'-phosphate
  modified_base 14: mod_base = OTHER; note = 2'-deoxy-2'-fluoroadenosine-3'-phosphate
  modified_base 15: mod_base = OTHER; note = 2'-O-methyluridine-3'-phosphate
  modified_base 16: mod_base = OTHER; note = 2'-deoxy-2'-fluorocytidine-3'-phosphate
  modified_base 17: mod_base = OTHER; note = 2'-O-methyladenosine-3'-phosphate
  modified_base 18: mod_base = OTHER; note = 2'-O-methyluridine-3'-phosphate
  modified_base 19: mod_base = OTHER; note = 2'-O-methyluridine-3'-phosphate
  modified_base 20: mod_base = OTHER; note = 2'-O-methyladenosine-3'-phosphate
  modified_base 21: mod_base = OTHER; note = 2'-O-methylguanosine-3'-phosphorothioate
  modified_base 22: mod_base = OTHER; note = 2'-O-methylguanosine-3'-phosphorothioate
  modified_base 23: mod_base = OTHER; note = 2'-O-methylcytidine
taacataattatcatcattaggc

SEQ ID NO: 14950 - RNA, 23 nt, synthetic construct
  source 1..23: mol_type = other RNA
  modified_base 1: mod_base = OTHER; note = 2'-O-methyluridine-3'-phosphorothioate 5'-(E)-Vinylphosphonate
  modified_base 2: mod_base = OTHER; note = 2'-deoxy-2'-fluorocytidine-3'-phosphorothioate
  modified_base 3: mod_base = OTHER; note = 2'-O-methyluridine-3'-phosphate
  modified_base 4: mod_base = OTHER; note = 2'-O-methylcytidine-3'-phosphate
  modified_base 5: mod_base = OTHER; note = 2'-O-methyladenosine-3'-phosphate
  modified_base 6: mod_base = OTHER; note = 2'-deoxy-2'-fluoroadenosine-3'-phosphate
  modified_base 7: mod_base = OTHER; note = 2'-O-methyladenosine-3'-phosphate
  modified_base 8: mod_base = OTHER; note = 2'-O-methylguanosine-3'-phosphate
  modified_base 9: mod_base = OTHER; note = 2'-O-methyladenosine-3'-phosphate
  modified_base 10: mod_base = OTHER; note = 2'-O-methyluridine-3'-phosphate
  modified_base 11: mod_base = OTHER; note = 2'-O-methyladenosine-3'-phosphate
  modified_base 12: mod_base = OTHER; note = 2'-O-methyluridine-3'-phosphate
  modified_base 13: mod_base = OTHER; note = 2'-O-methyluridine-3'-phosphate
  modified_base 14: mod_base = OTHER; note = 2'-deoxy-2'-fluorocytidine-3'-phosphate
  modified_base 15: mod_base = OTHER; note = 2'-O-methyladenosine-3'-phosphate
  modified_base 16: mod_base = OTHER; note = 2'-deoxy-2'-fluorocytidine-3'-phosphate
  modified_base 17: mod_base = OTHER; note = 2'-O-methyladenosine-3'-phosphate
  modified_base 18: mod_base = OTHER; note = 2'-O-methyluridine-3'-phosphate
  modified_base 19: mod_base = OTHER; note = 2'-O-methyluridine-3'-phosphate
  modified_base 20: mod_base = OTHER; note = 2'-O-methylcytidine-3'-phosphate
  modified_base 21: mod_base = OTHER; note = 2'-O-methyladenosine-3'-phosphorothioate
  modified_base 22: mod_base = OTHER; note = 2'-O-methyluridine-3'-phosphorothioate
  modified_base 23: mod_base = OTHER; note = 2'-O-methyluridine
tctcaaagatattcacattcatt

SEQ ID NO: 14951 - RNA, 23 nt, synthetic construct
  source 1..23: mol_type = other RNA
  modified_base 1: mod_base = OTHER; note = 2'-O-methyluridine-3'-phosphorothioate 5'-(E)-Vinylphosphonate
  modified_base 2: mod_base = OTHER; note = 2'-deoxy-2'-fluoroadenosine-3'-phosphorothioate
  modified_base 3: mod_base = OTHER; note = 2'-O-methyluridine-3'-phosphate
  modified_base 4: mod_base = OTHER; note = 2'-O-methyluridine-3'-phosphate
  modified_base 5: mod_base = OTHER; note = 2'-O-methylguanosine-3'-phosphate
  modified_base 6: mod_base = OTHER; note = 2'-deoxy-2'-fluorouridine-3'-phosphate
  modified_base 7: mod_base = OTHER; note = 2'-O-methyladenosine-3'-phosphate
  modified_base 8: mod_base = OTHER; note = 2'-O-methyluridine-3'-phosphate
  modified_base 9: mod_base = OTHER; note = 2'-O-methylcytidine-3'-phosphate
  modified_base 10: mod_base = OTHER; note = 2'-O-methyladenosine-3'-phosphate
  modified_base 11: mod_base = OTHER; note = 2'-O-methyluridine-3'-phosphate
  modified_base 12: mod_base = OTHER; note = 2'-O-methylcytidine-3'-phosphate
  modified_base 13: mod_base = OTHER; note = 2'-O-methyladenosine-3'-phosphate
  modified_base 14: mod_base = OTHER; note = 2'-deoxy-2'-fluoroadenosine-3'-phosphate
  modified_base 15: mod_base = OTHER; note = 2'-O-methylguanosine-3'-phosphate
  modified_base 16: mod_base = OTHER; note = 2'-deoxy-2'-fluorocytidine-3'-phosphate
  modified_base 17: mod_base = OTHER; note = 2'-O-methyladenosine-3'-phosphate
  modified_base 18: mod_base = OTHER; note = 2'-O-methyluridine-3'-phosphate
  modified_base 19: mod_base = OTHER; note = 2'-O-methyluridine-3'-phosphate
  modified_base 20: mod_base = OTHER; note = 2'-O-methyluridine-3'-phosphate
  modified_base 21: mod_base = OTHER; note = 2'-O-methylcytidine-3'-phosphorothioate
  modified_base 22: mod_base = OTHER; note = 2'-O-methyladenosine-3'-phosphorothioate
  modified_base 23: mod_base = OTHER; note = 2'-O-methylguanosine
tattgtatcatcaagcatttcag

SEQ ID NO: 14952 - RNA, 23 nt, synthetic construct
  source 1..23: mol_type = other RNA
ttttgtgtgattcttcaaacttc

SEQ ID NO: 14953 - RNA, 23 nt, synthetic construct
  source 1..23: mol_type = other RNA
aagtgtgtatgtcttttgtgtga

SEQ ID NO: 14954 - RNA, 23 nt, synthetic construct
  source 1..23: mol_type = other RNA
gtcatagttccaacaatgttacc

SEQ ID NO: 14955 - RNA, 23 nt, synthetic construct
  source 1..23: mol_type = other RNA
aatgtgaatatctttgagtcctt

SEQ ID NO: 14956 - RNA, 23 nt, synthetic construct
  source 1..23: mol_type = other RNA
caaagcctaatgatgataattat

SEQ ID NO: 14957 - RNA, 23 nt, synthetic construct
  source 1..23: mol_type = other RNA
caaagcctaatgatgataattat

SEQ ID NO: 14958 - RNA, 23 nt, synthetic construct
  source 1..23: mol_type = other RNA
ctatatctcaactttgtgtcaaa

SEQ ID NO: 14959 - RNA, 23 nt, synthetic construct
  source 1..23: mol_type = other RNA
aaatgcttgatgatacaatgaat

SEQ ID NO: 14960 - RNA, 23 nt, synthetic construct
  source 1..23: mol_type = other RNA
gtgtgtatgtcttttgtgtgatt

SEQ ID NO: 14961 - RNA, 23 nt, synthetic construct
  source 1..23: mol_type = other RNA
gcctaatgatgataattatgtta

SEQ ID NO: 14962 - RNA, 23 nt, synthetic construct
  source 1..23: mol_type = other RNA
aatgaatgtgaatatctttgagt

SEQ ID NO: 14963 - RNA, 23 nt, synthetic construct
  source 1..23: mol_type = other RNA
ctgaaatgcttgatgatacaatg

SEQ ID NO: 14964 - DNA, 21 bp, synthetic construct
  source 1..21: mol_type = other DNA
  modified_base 1: mod_base = OTHER; note = 2'-O-methylcytidine-3'-phosphate
  modified_base 2: mod_base = OTHER; note = 2'-O-methyluridine-3'-phosphate
  modified_base 3: mod_base = OTHER; note = 2'-O-methyluridine-3'-phosphate
  modified_base 4: mod_base = OTHER; note = adenosine-3'-phosphate
  modified_base 5: mod_base = OTHER; note = 2'-O-methylcytidine-3'-phosphate
  modified_base 6: mod_base = OTHER; note = guanosine-3'-phosphate
  modified_base 7: mod_base = OTHER; note = 2'-O-methylcytidine-3'-phosphate
  modified_base 8: mod_base = OTHER; note = 2'-O-methyluridine-3'-phosphate
  modified_base 9: mod_base = OTHER; note = guanosine-3'-phosphate
  modified_base 10: mod_base = OTHER; note = adenosine-3'-phosphate
  modified_base 11: mod_base = OTHER; note = guanosine-3'-phosphate
  modified_base 12: mod_base = OTHER; note = 2'-O-methyluridine-3'-phosphate
  modified_base 13: mod_base = OTHER; note = adenosine-3'-phosphate
  modified_base 14: mod_base = OTHER; note = 2'-O-methylcytidine-3'-phosphate
  modified_base 15: mod_base = OTHER; note = 2'-O-methyluridine-3'-phosphate
  modified_base 16: mod_base = OTHER; note = 2'-O-methyluridine-3'-phosphate
  modified_base 17: mod_base = OTHER; note = 2'-O-methylcytidine-3'-phosphate
  modified_base 18: mod_base = OTHER; note = guanosine-3'-phosphate
  modified_base 19: mod_base = OTHER; note = adenosine-3'-phosphate
  modified_base 20: mod_base = OTHER; note = 2'-deoxythymidine-3'-phosphorothioate
  misc_feature 1..19: note = RNA
  misc_feature 20..21: note = DNA
cttacgctgagtacttcgatt

SEQ ID NO: 14965 - DNA, 21 bp, synthetic construct
  source 1..21: mol_type = other DNA
  modified_base 1: mod_base = OTHER; note = uridine-3'-phosphate
  modified_base 2: mod_base = OTHER; note = cytidine-3'-phosphate
  modified_base 3: mod_base = OTHER; note = guanosine-3'-phosphate
  modified_base 4: mod_base = OTHER; note = adenosine-3'-phosphate
  modified_base 5: mod_base = OTHER; note = adenosine-3'-phosphate
  modified_base 6: mod_base = OTHER; note = guanosine-3'-phosphate
  modified_base 7: mod_base = OTHER; note = 2'-O-methyluridine-3'-phosphate
  modified_base 8: mod_base = OTHER; note = adenosine-3'-phosphate
  modified_base 9: mod_base = OTHER; note = cytidine-3'-phosphate
  modified_base 10: mod_base = OTHER; note = uridine-3'-phosphate
  modified_base 11: mod_base = OTHER; note = 2'-O-methylcytidine-3'-phosphate
  modified_base 12: mod_base = OTHER; note = adenosine-3'-phosphate
  modified_base 13: mod_base = OTHER; note = guanosine-3'-phosphate
  modified_base 14: mod_base = OTHER; note = cytidine-3'-phosphate
  modified_base 15: mod_base = OTHER; note = guanosine-3'-phosphate
  modified_base 16: mod_base = OTHER; note = 2'-O-methyluridine-3'-phosphate
  modified_base 17: mod_base = OTHER; note = adenosine-3'-phosphate
  modified_base 18: mod_base = OTHER; note = adenosine-3'-phosphate
  modified_base 19: mod_base = OTHER; note = guanosine-3'-phosphate
  modified_base 20: mod_base = OTHER; note = 2'-deoxythymidine-3'-phosphorothioate
  misc_feature 1..19: note = RNA
  misc_feature 20..21: note = DNA
tcgaagtactcagcgtaagtt

SEQ ID NO: 14966 - protein, 10 aa, synthetic construct
TIVLQEIVGK
